(19) United States
(12) Patent Application Publication
(10) Pub. No.: US 2024/0279670 A1
(43) Pub. Date: Aug. 22, 2024

(54) CHARACTERIZATION OF PLANT CULTIVARS BASED ON TERPENE SYNTHASE GENE PROFILES

(71) Applicant: Front Range Biosciences, Inc., Boulder, CO (US)

(72) Inventors: Christopher Stephen PAULI, Boulder, CO (US); Anthony TORRES, Oakland, CA (US); Reginald GAUDINO, San Marcos, CA (US); Keith ALLEN, Port Ludlow, WA (US); Thomas BLANK, Palmetto, FL (US); Kymron B.J. DE CESARE, Los Gatos, CA (US)

(21) Appl. No.: 18/201,686

(22) Filed: May 24, 2023

Related U.S. Application Data
(63) Continuation of application No. 17/361,187, filed on Jun. 28, 2021, now abandoned.
(60) Provisional application No. 63/045,604, filed on Jun. 29, 2020.

(51) Int. Cl. C12N 15/82

(52) U.S. Cl. CPC C12N 15/8245

(57) ABSTRACT

This technology relates in part to methods of identifying plant cultivars based on the terpene synthase genes that are identified and/or quantified (e.g., copy number, ploidy) in the cultivars. The methods provided herein permit plant cultivars with desired characteristics/phenotypes, e.g., a desired terpene production profile, to be selected for use in various applications, such as agriculture (e.g., selecting cultivars for breeding desired characteristics and/or lineages) and medicine (e.g., therapeutic activity).

### RELATED PATENT APPLICATIONS

[0001] This patent application is a continuation of U.S. Application Ser. No. 17/361,187 filed on Jun. 28, 2021, entitled CHARACTERIZATION OF PLANT CULTIVARS BASED ON TERPENE SYNTHASE GENE PROFILES, naming Christopher Stephen PAULI et al. as inventors, and designated by Attorney Docket No. FRB-1002T1, which claims priority to U.S. Provisional Patent Application No. 63/045,604 filed on Jun. 29, 2020, entitled CHARACTERIZATION OF PLANT CULTIVARS BASED ON TERPENE SYNTHASE GENE PROFILES, naming Christopher Stephen PAULI et al. as inventors, and designated by Attorney Docket No. FRB-1002-PV. The entire contents of the foregoing patent applications are incorporated herein by reference for all purposes.

### SEQUENCE LISTING

[0002] The instant application contains a Sequence Listing which has been submitted electronically in XML format and is hereby incorporated by reference in its entirety. Said XML copy, created on Apr. 11, 2024, is named FRB-1002CON_SL.xml and is 1,928,025 bytes in size.

### FIELD

[0003] The technology relates in part to methods and compositions for detecting one or more terpene synthase genes and/or paralogs thereof in plants, thereby obtaining terpene synthase gene profiles. These profiles can be used to identify plant cultivars of a desired phenotype for agricultural, medicinal or industrial use.

### BACKGROUND

[0004] Terpenes are the largest and most structurally diverse class of natural compounds. They are produced by a large variety of plants, fungi, bacteria, and a few insects. To date, around 50,000 terpenoid metabolites, including monoterpenes, sesquiterpenes, and diterpenes, have been identified from higher plants, liverworts, and fungi. Terpenes play central roles in plant communication with the environment, including attracting beneficial organisms, repelling harmful ones, and facilitating communication between plants. The diversity of terpenoid compounds produced by plants plays an important role in mediating plant-herbivore, plant-pollinator, and plant-pathogen interactions. In plants such as Cannabis cultivars (e.g., Cannabis sativa), monoterpenes and sesquiterpenes are also responsible for most of their odor and flavor properties. Thus, variation in terpene content can be an important differentiator between cultivars of plants. Terpene synthases (TPSs) are the key enzymes responsible for the biosynthesis of terpenes. Angiosperms, such as Cannabis, tend to have moderately large families of these enzymes, some apparently from recent duplications (e.g., paralogous enzymes), and others quite distant from each other, with both divergent and convergent evolution taking place. Thus, some TPS enzymes are highly divergent in sequence, while others (e.g., paralogs) differ from existing enzymes by just a few amino acids. Regardless, in general, the product profile of a given TPS enzyme cannot readily be determined from sequence similarity with or differences from other TPS gene family members. Therefore, for a given plant cultivar, there is a need to reliably identify all the members of the TPS gene family that are present, regardless of whether they are similar or different in sequence, in order to characterize the terpene production profile of a plant cultivar.

### SUMMARY

[0005] Provided herein are methods of analyzing a plant cultivar containing at least one terpene synthase gene or a paralog thereof, that include:
[0006] (a) obtaining a nucleic acid sample from the plant cultivar;
[0007] (b) contacting the nucleic acid sample with at least one polynucleotide primer pair under amplification conditions, thereby preparing a mixture, wherein the polynucleotide primer pair hybridizes to a unique subsequence of the terpene synthase gene or a paralog thereof, wherein the unique subsequence of the terpene synthase gene or a paralog thereof is different than the other subsequences of the terpene synthase gene or a paralog thereof and the unique subsequence of the terpene synthase gene or a paralog thereof is different than the subsequences of other terpene synthase genes and/or paralogs thereof;
[0008] (c) amplifying the mixture, thereby obtaining an amplified mixture; and
[0009] (d) analyzing the amplified mixture of (c), whereby at least one terpene synthase gene or a paralog thereof is identified and/or quantified in the amplified mixture.

[0010] The terpene synthase (TPS) genes or paralogs thereof analyzed by any of the methods provided herein can have sequence identity at percentages from between about 40% to about 90, 91, 92, 93, 94, 95, 96, 97, 98, 99 or 100%, such as at least 41, 42, 43, 44, 45, 46, 47, 48, 49, 50, 51, 52, 53, 54, 55, 56, 57, 58, 59, 60, 61, 62, 63, 64, 65, 66, 67, 68, 69, 70, 71, 72, 73, 74, 75, 76, 77, 78, 79, 80, 81, 82, 83, 84, 85, 86, 87, 88, 89, 90, 91, 92, 93, 94, 95, 96, 97, 98, 99 or 100%. In certain embodiments, the TPS gene is a paralog of another TPS gene. As used herein, the term “paralog” refers to members of a family of genes, such as a family of TPS genes, that share a high degree of overall sequence identity, generally at least about 80%, or about 80, 81, 82, 83, 84, 85, 86, 87, 88, 89, 90, 91, 92, 93, 94, 95, 96, 97, 98 or 99% or more sequence identity, but less than 100% sequence identity. In embodiments, the TPS paralogs share 90, 91, 92, 93, 94, 95, 96, 97, 98, 99, 99.1, 99.2, 99.3, 99.4, 99.5, 99.6, 99.7, 99.8 Or 99.9% or more sequence identity, but less than 100% sequence identity. Paralogs of a gene, such as a TPS gene, can sometimes arise by duplication within one species. While paralogs of a gene can have the same function and share a high degree of sequence identity, the paralogs often diverge and develop differences in function. For example, paralogs of TPS that are analyzed by the methods provided herein can have differences in their function, such as differing in the amount of a terpene that is generated by catalysis with each paralog, or the type of terpene generated, or the number of terpene products that are generated. A family of genes, as referred to herein, means genes that perform the same function, e.g., catalyzing the synthesis of terpenes, but are involved in producing different terpenes or sets of terpenes. For example, the TPS genes can include monoterpene synthases, diterpene synthases, sesquiterpene synthases and paralogs thereof. Within each of the classes of TPS genes, the types and/or combinations of terpenes (monoterpenes, diterpenes, sesquiterpenes) that are produced can vary.

[0011] The unique subsequence of a terpene synthase gene (TPS), such as an exon or a portion thereof, or an intron or a portion thereof, can differ from other subsequences of the terpene synthase gene or from subsequences of other terpene synthase genes by 1, 2, 3, 4, 5, 6, 7, 8, 9, 10, 11, 12, 13, 14, 15, 16, 17, 18, 19, 20, 21, 22, 23, 24, 25, 26, 27, 28, 29, 30, 31, 32, 33, 34, 35, 36, 37, 38, 39, 40, 41, 42, 43, 44, 45, 46, 47, 48, 49, 50, 51, 52, 53, 54, 55, 56, 57, 58, 59, 60, 61, 62, 63, 64, 65, 66, 67, 68, 69, 70, 71, 72, 73, 74, 75, 76, 77, 78, 79, 80, 81, 82, 83, 84, 85, 86, 87, 88, 89, 90, 91, 92, 93, 94, 95, 96, 97, 98, 99 or 100 or more bases, such as 110, 120, 130, 140 or 150 or more bases. In embodiments of the methods provided herein, each primer pair specifically hybridizes to a unique subsequence of a TPS gene. In the methods provided herein, identifying and/or quantifying the TPS genes of a plant cultivar based on amplifying unique subsequences of the TPS genes, such as an exon, an intron or a portion thereof that is uniquely present in one TPS gene and not in any other TPS gene, the TPS gene profile of a plant cultivar can be obtained regardless of the overall sequence identity among the TPS genes in the profile, including when the overall sequence identity among certain TPS genes is high (e.g., paralogs). the other subsequences of the terpene synthase gene or a paralog thereof and the unique subsequence of the terpene synthase gene or a paralog thereof is different than the subsequences of other terpene synthase genes and/or paralogs thereof;

[0012] In embodiments, provided herein is a method of preparing nucleic acid containing at least one terpene synthase gene or a paralog thereof from a plant cultivar comprising the at least one terpene synthase gene or a paralog thereof, that include:
[0013] (a) obtaining a nucleic acid sample from the plant cultivar;
[0014] (b) contacting the nucleic acid sample with at least one polynucleotide primer pair under amplification conditions, thereby preparing a mixture, wherein the polynucleotide primer pair hybridizes to a unique subsequence of the terpene synthase gene or a paralog thereof, wherein the unique subsequence of the terpene synthase gene or a paralog thereof is different than the other subsequences of the terpene synthase gene or a paralog thereof and the unique subsequence of the terpene synthase gene is different than the subsequences of the other terpene synthase genes and/or paralogs thereof;
[0015] (c) amplifying the mixture, thereby obtaining an amplified mixture; and
[0016] (d) analyzing the amplified mixture of (c), whereby at least one terpene synthase gene or a paralog thereof is identified and/or quantified in the amplified mixture.

[0017] In certain embodiments, the plant cultivar contains a plurality of terpene synthase genes and/or paralogs thereof and the method includes:
[0018] in (b), contacting the nucleic acid sample with a plurality of polynucleotide primer pairs under amplification conditions, thereby preparing a mixture, wherein each of the plurality of polynucleotide primer pairs hybridizes to a unique subsequence of a terpene synthase gene or a paralog thereof, wherein the unique subsequence of the terpene synthase gene or a paralog thereof is different than the other subsequences of the terpene synthase gene or a paralog thereof and the unique subsequence of the terpene synthase gene or a paralog thereof is different than the subsequences of the other terpene synthase genes and/or paralogs thereof; and
[0019] in (d), a plurality of terpene synthase genes and/or paralogs thereof are identified and/or quantified.

[0020] In certain embodiments, each of the primers of a polynucleotide primer pair hybridizes to a conserved region of the subsequence and the hybridized polynucleotide primer pair flanks a variable region of the subsequence. In embodiments, the subsequence contains an exon, an intron, a portion within an exon or a portion within an intron. In certain embodiments, the subsequence is an exon or a portion within an exon.

[0021] In embodiments of the methods provided herein, the identification in (d) is by one or more of high-resolution melting (HRM), quantitative PCR (qPCR), loop-mediated isothermal amplification (LAMP), restriction endonuclease digestion, gel electrophoresis and sequencing. In certain embodiments, the number of TPS genes and/or paralogs thereof that are analyzed according to the methods provided herein can be from a single TPS gene to 100 or more TPS genes, e.g., 1, 2, 3, 4, 5, 6, 7, 8, 9, 10, 11, 12, 13, 14, 15, 16, 17, 18, 19, 20, 21, 22, 23, 24, 25, 26, 27, 28, 29, 30, 31, 32, 33, 34, 35, 36, 37, 38, 39, 40, 41, 42, 43, 44, 45, 46, 47, 48, 49, 50, 51, 52, 53, 54, 55, 56, 57, 58, 59, 60, 61, 62, 63, 64, 65, 66, 67, 68, 69, 70, 71, 72, 73, 74, 75, 76, 77, 78, 79, 80, 81, 82, 83, 84, 85, 86, 87, 88, 89, 90, 91, 92, 93, 94, 95, 96, 97, 98, 99 or 100 or more TPS genes or paralogs of TPS genes.

[0022] In certain embodiments of the methods provided herein, one or more of the polynucleotide primer pairs are selected from among those set forth in SEQ ID NOS: 1-1284. In embodiments of the methods provided herein, one or more of the polynucleotide primer pairs are selected from among those set forth in SEQ ID NOS: 1-1284, or sequences that share 90%, 91%, 92%, 93%, 94%, 95%, 96%, 97%, 98%, 99% or more identity with any of the sequences set forth in SEQ ID NOS: 1-1284. In embodiments, any of the forward primers in the primer pairs provided in SEQ ID NOS: 1-1284, or in sequences that share 90%, 91%, 92%, 93%, 94%, 95%, 96%, 97%, 98%, 99% or more identity with any of the sequences set forth in SEQ ID NOS: 1-1284, can be paired with any of the reverse primers of the primer pairs having the sequences set forth in SEQ ID NOS: 1-1284, or in sequences that share 90%, 91%, 92%, 93%, 94%, 95%, 96%, 97%, 98%, 99% or more identity with any of the sequences set forth in SEQ ID NOS: 1-1284.

[0023] In embodiments, at least one terpene synthase is a paralog of a terpene synthase gene. The terpene synthase genes and/or paralogs thereof that are identified and/or quantified by the methods provided herein can, in certain embodiments, be selected from among monoterpene synthase genes and/or paralogs thereof, diterpene synthase genes and/or paralogs thereof, sesquiterpene synthase genes and/or paralogs thereof, or any combination thereof. In embodiments, based on the terpene synthase genes and/or paralogs thereof that are identified and/or quantified, the terpene synthase gene and/or paralog expression profile and/or the terpene production profile of the plant cultivar is determined. In certain embodiments, the terpene synthase gene and/or paralog expression profile and/or the terpene production profile is of the root, flower, stem, leaf or any combination thereof.

[0024] In certain embodiments of the methods provided herein, based on the terpene synthase genes and/or paralogs thereof that are identified and/or quantified and/or based on the terpene synthase gene expression profile that is determined and/or based on the terpene production profile that is determined, a lineage of the plant cultivar is assigned. In certain embodiments, based on the assigned lineage, the plant is selected for cultivation as a crop, or for in-breeding or out-crossing. Also provided herein are methods of cultivating crops by selecting a plant cultivar based on its lineage. Also provided herein are methods of breeding a plant cultivar that is selected based on its lineage. In certain embodiments, offspring plant cultivars can be bred for a desired terpene synthase gene expression profile, terpene content or cannabinoid content by tracking the terpene synthase genes in the parent plant cultivars.

[0025] In embodiments, based on the terpene synthase genes and/or paralogs thereof that are identified and/or quantified and/or based on the terpene synthase gene and/or paralog thereof expression profile that is determined and/or based on the terpene production profile that is determined, a medicinal use of the plant cultivar is assigned. In embodiments, the medicinal use can be selected from among antioxidant, anti-inflammatory, antibacterial, antiviral, anti-anxiety, antinociceptive, analgesic, antihypertensive, sedative, antidepressant, acetylcholine esterase inhibition (AChEI), neuro-protective and gastro-protective effects, or any combinations thereof. In certain embodiments, a plant cultivar is selected for a desired medicinal use. In embodiments, provided herein are methods of treatment comprising administering a plant cultivar, or portion thereof (e.g., seed, root, stem, flower) or an extract thereof (e.g., extracts from tissues of the plant cultivar) to a subject having a condition or disease in need of such treatment, whereby the condition or disease, or symptoms thereof, are ameliorated or reduced. In certain embodiments, based on the medicinal use, the plant is selected for cultivation as a crop, or for in-breeding or out-crossing. Also provided herein are methods of cultivating crops by selecting a plant cultivar based on its medicinal use. Also provided herein are methods of breeding a plant cultivar that is selected based on its medicinal use.

[0026] In embodiments, based on the terpene synthase genes and/or paralogs thereof that are identified and/or quantified and/or based on the terpene synthase gene and/or paralog thereof expression profile that is determined and/or based on the terpene production profile that is determined, the plant cultivar is identified as resistant to an organism or situation, or as having an affinity towards or favoring an organism or situation. In certain embodiments, the organism or situation is selected from among insects, pests, mold, pesticides and other chemicals, mildew, fungi, bacteria, viruses or other pathogens, an environmental condition, such as climate or soil conditions, or a geographic location.

[0027] In embodiments of any of the methods provided herein, a plurality of plant cultivars can be analyzed. In certain embodiments, the plant cultivars are of the same species. In embodiments, the plurality of plant cultivars can be classified based on lineage and/or based on medicinal use. In certain embodiments of the methods provided herein, one or more plant cultivars is/are a Cannabis cultivar. In aspects, the Cannabis cultivar is selected from among one or more of Type 1, Type 2, Type 3, Type 4 and Type 5 cultivars. In embodiments, one or more plant cultivars are of the family Rosidae.

[0028] In certain embodiments, the monoterpene synthase genes and/or paralogs thereof of the Cannabis plant cultivar are identified and/or quantified and, based on the identified and/or quantified monoterpene synthase genes and/or the expression profile of the identified and/or quantified monoterpene synthase genes and/or paralogs thereof, the terpene production profile, the cannabinoid production profile, the flavonoid production profile, or any combination of two or more of the terpene production profile, the cannabinoid production profile and the flavonoid production profile of the Cannabis plant cultivar is determined.

[0029] In embodiments, based on the terpene synthase genes and/or paralogs thereof of the Cannabis plant cultivar that are identified and/or quantified, or based on the expression profile of the identified and/or quantified terpene synthase genes and/or paralogs thereof, or based on the terpene production profile, or based on the cannabinoid production profile, or based on the flavonoid production profile, or based on any combination thereof, a lineage of the Cannabis plant cultivar is assigned, and/or a medicinal use of the plant cultivar is assigned. In certain embodiments, a plurality of Cannabis plant cultivars are analyzed and in embodiments, the plurality of Cannabis plant cultivars are further classified based on lineage and/or based on medicinal use.

[0030] In any of the methods provided herein, in certain embodiments, at least one plant cultivar that is analyzed produces one or more terpenes selected from among α-Bisabolol, endo-Borneol, Camphene, Camphor, 3-Carene, Caryophyllene, Caryophyllene Oxide, α-Cedrene, Cedrol, Citronellol, Eucalyptol (1,8 Cineole), α-Farnesene, β-Farnesene, Fenchol, Fenchone, Geraniol, Geranyl Acetate, Guaiol, Humulene, Isoborneol, Isopulegol, D-Limonene, Linalool, Menthol, β-Myrcene, Nerol, trans-Nerolidol, cis-Nerolidol, trans-Ocimene, cis-Ocimene, α-Phellandrene, Phytol 1, Phytol 2, α-Pinene, β-Pinene, Pulegone, Sabinene, Sabinene Hydrate, α-Terpinene, γ-Terpinene, α-Terpineol, Terpinolene, Valencene, γ-Elemene, Z-Ocimene, E-Ocimene, α-Thujone, Thujene, γ-Muurolene, 2-Norpinene, α-Santalene, α-Selinene, Germacrene D, Eudesma-3,7(11)-diene, δ-Cadinol, trans-α-Beramotene, trans-2-pinanol, p-cymen-8-ol, Sativene, Cyclosativene, α-guaiene, γ-gurjunene, α-bulnesene, Bulnesol, α-eudesmol, β-eudesmol, Hedycaryol, γ-eudesmol, Alloaromadendrene, p-cymene, α-Copaene, β-Elemene, α-Cubebene, Linalyl acetate, Bornyl acetate, Heptacosane, Tricosane, S-Limonene, (−)-Thujopsene, Hashenene 5,5-dimethyl-1-vinylbicyclo[2.1.1]hexane, (−)-englerin A and Artemisinin.

[0031] In embodiments, the at least one plant cultivar includes terpene synthases that produce, singly or as combinations of terpene synthases, one or more terpenes selected from among α-Bisabolol, endo-Borneol, Camphene, Camphor, 3-Carene, Caryophyllene, Caryophyllene Oxide, α-Cedrene, Cedrol, Citronellol, Eucalyptol (1,8 Cineole), α-Farnesene, β-Farnesene, Fenchol, Fenchone, Geraniol, Geranyl Acetate, Guaiol, Humulene, Isoborneol, Isopulegol, D-Limonene, Linalool, Menthol, β-Myrcene, Nerol, trans-Nerolidol, cis-Nerolidol, trans-Ocimene, cis-Ocimene, α-Phellandrene, Phytol 1, Phytol 2, α-Pinene, β-Pinene, Pulegone, Sabinene, Sabinene Hydrate, α-Terpinene, γ-Terpinene, α-Terpineol, Terpinolene, Valencene, γ-Elemene, Z-Ocimene, E-Ocimene, α-Thujone, Thujene, γ-Muurolene, 2-Norpinene, α-Santalene, α-Selinene, Germacrene D, Eudesma-3,7(11)-diene, δ-Cadinol, trans-α-Beramotene, trans-2-pinanol, p-cymen-8-ol, Sativene, Cyclosativene, α-guaiene, γ-gurjunene, α-bulnesene, Bulnesol, α-eudesmol, β-eudesmol, Hedycaryol, γ-eudesmol, Alloaromadendrene, p-cymene, α-Copaene, β-Elemene, α-Cubebene, Linalyl acetate, Bornyl acetate, Heptacosane, Tricosane, S-Limonene, (−)-Thujopsene, Hashenene 5,5-dimethyl-1-vinylbicyclo[2.1.1]hexane, (−)-englerin A and Artemisinin.

[0032] In certain embodiments of the methods provided herein, a terpene production profile is determined for one or more terpenes selected from among α-Bisabolol, endo-Borneol, Camphene, Camphor, 3-Carene, Caryophyllene, Caryophyllene Oxide, α-Cedrene, Cedrol, Citronellol, Eucalyptol (1,8 Cineole), α-Farnesene, β-Farnesene, Fenchol, Fenchone, Geraniol, Geranyl Acetate, Guaiol, Humulene, Isoborneol, Isopulegol, D-Limonene, Linalool, Menthol, β-Myrcene, Nerol, trans-Nerolidol, cis-Nerolidol, trans-Ocimene, cis-Ocimene, α-Phellandrene, Phytol 1, Phytol 2, α-Pinene, 3-Pinene, Pulegone, Sabinene, Sabinene Hydrate, α-Terpinene, γ-Terpinene, α-Terpineol, Terpinolene, Valencene, γ-Elemene, Z-Ocimene, E-Ocimene, α-Thujone, Thujene, γ-Muurolene, 2-Norpinene, α-Santalene, α-Selinene, Germacrene D, Eudesma-3,7(11)-diene, δ-Cadinol, trans-α-Beramotene, trans-2-pinanol, p-cymen-8-ol, Sativene, Cyclosativene, α-guaiene, γ-gurjunene, α-bulnesene, Bulnesol, α-eudesmol, β-eudesmol, Hedycaryol, γ-eudesmol, Alloaromadendrene, p-cymene, α-Copaene, β-Elemene, α-Cubebene, Linalyl acetate, Bornyl acetate, Heptacosane, Tricosane, S-Limonene, (−)-Thujopsene, Hashenene 5,5-dimethyl-1-vinylbicyclo[2.1.1]hexane, (−)-englerin A and Artemisinin.

[0033] In embodiments of the methods provided herein, at least one plant cultivar that is analyzed expresses one or more terpene synthases selected from among TPS11, TPS11-like, TPS12, TPS12-like, TPS13, TPS13-like, TPS13-like2, TPS14, TPS15, TPS16, TPS17, TPS18, TPS19, TPS1, TPS20, TPS23, TPS24, TPS2, TPS30, TPS30-like, TPS32, TPS33, TPS36, TPS37, TPS38, TPS39, TPS3, TPS40, TPS41, TPS42, TPS43, TPS44, TPS45, TPS46, TPS47, TPS48, TPS49, TPS4, TPS4-like, TPS50, TPS51, TPS52, TPS53, TPS54, TPS55, TPS56, TPS57, TPS58, TPS59, TPS5, TPS5, TPS60, TPS61, TPS62, TPS63, TPS64, TPS6, TPS6-like, TPS7, TPS8, TPS8, TPS8-like, TPS9, TPS9, TPS9-like and TPS9-like2. In certain embodiments, a terpene synthase expression profile is determined for one or more terpene synthases selected from among TPS11, TPS11-like, TPS12, TPS12-like, TPS13, TPS13-like, TPS13-like2, TPS14, TPS15, TPS16, TPS17, TPS18, TPS19, TPS1, TPS20, TPS23, TPS24, TPS2, TPS30, TPS30-like, TPS32, TPS33, TPS36, TPS37, TPS38, TPS39, TPS3, TPS40, TPS41, TPS42, TPS43, TPS44, TPS45, TPS46, TPS47, TPS48, TPS49, TPS4, TPS4-like, TPS50, TPS51, TPS52, TPS53, TPS54, TPS55, TPS56, TPS57, TPS58, TPS59, TPS5, TPS5, TPS60, TPS61, TPS62, TPS63, TPS64, TPS6, TPS6-like, TPS7, TPS8, TPS8, TPS8-like, TPS9, TPS9, TPS9-like and TPS9-like2. In certain embodiments, the one or more terpene synthases are selected from among TPS11JL, TPS11-likeJL, TPS12JL, TPS12-likeJL, TPS13JL, TPS13-likeJL, TPS13-like2JL, TPS14JL, TPS15JL, TPS16JL, TPS17JL, TPS18JL, TPS19JL, TPS1JL, TPS20JL, TPS23JL, TPS24JL, TPS2JL, TPS30JL, TPS30-likeJL, TPS32JL, TPS33JL, TPS36JL, TPS37JL, TPS38JL, TPS39JL, TPS3JL, TPS40JL, TPS41JL, TPS42JL, TPS43JL, TPS44JL, TPS45JL, TPS46JL, TPS47JL, TPS48JL, TPS49JL, TPS4JL, TPS4-likeJL, TPS50JL, TPS51JL, TPS52JL, TPS53JL, TPS54JL, TPS55JL, TPS56JL, TPS57JL, TPS58JL, TPS59JL, TPS5JL, TPS5JL, TPS60JL, TPS61JL, TPS62JL, TPS63JL, TPS64JL, TPS6JL, TPS6-likeJL, TPS7JL, TPS8JL, TPS8JL, TPS8-likeJL, TPS9JL, TPS9JL, TPS9-likeJL and TPS9-like2JL.

[0034] In certain embodiments of the methods provided herein, the plant cultivar is a Cannabis cultivar selected from among Cannabis sativa, a Cannabis indica, or Cannabis ruderalis, such as Jamaican Lion (JL), Purple Kush (PK), CannaTsu (CT), Finola (FN), Valley Fire (VF), Cherry Chem (CC), LPA004 (L4), and LPA021.3 (L21). Examples of Cannabis genomes include CS10, Arcata Trainwreck, Grape Stomper, Citrix, Black 84, Headcheese, Red Eye OG, Tahoe OG, Master Kush, Chem 91, Domnesia, Sour Tsunami, Sour Tsunami_x_CK, Tibor_1_2016, 80 E-1, 80 E-2, 80 E-3, Harlox, Saint Jack, Herijuana, Mothers Milk_5, Black Beauty, Sour Diesel, JL_1, JL_2, JL_3, JL_4, JL_5, JL_6, JL_father, BBCC_x_JL_father, JL_mother, JL_mother_p, IdaliaFT_1, Fedora17_6_1, Carmal_1_2016, CS_1_2016, ElCam_1_2016, C3/USO-1, Carmagnola_3, and Merino_S_1.

[0035] In any of the methods provided herein, in certain embodiments, the methods further include, based on identifying one or more terpene synthase genes and/or paralogs thereof, determining the expression profile of one or more terpene synthase genes and/or paralogs thereof, determining the production profile of one or more terpenes, determining the production profile of one or more cannabinoids, determining the production profile of one or more flavonoids or a combination thereof, selecting a plant cultivar for in-breeding or out-crossing, or for cultivating as a crop. In certain embodiments, the plant cultivar is selected for its lineage that is assigned, and/or a medicinal use that is assigned based on identifying one or more terpene synthase genes and/or paralogs thereof, determining the expression profile of one or more terpene synthase genes and/or paralogs thereof, determining the production profile of one or more terpenes, determining the production profile of one or more cannabinoids, determining the production profile of one or more flavonoids or a combination thereof. In embodiments, the plant cultivar is selected for resistance to an organism or situation that is identified based on identifying and/or quantifying one or more terpene synthase genes and/or paralogs thereof, determining the expression profile of one or more terpene synthase genes and/or paralogs thereof, determining the production profile of one or more terpenes, determining the production profile of one or more cannabinoids, determining the production profile of one or more flavonoids or a combination thereof. In certain embodiments, the plant cultivar is selected for having an affinity towards an organism or situation that is identified based on identifying and/or quantifying one or more terpene synthase genes and/or paralogs thereof, determining the expression profile of one or more terpene synthase genes and/or paralogs thereof, determining the production profile of one or more terpenes, determining the production profile of one or more cannabinoids, determining the production profile of one or more flavonoids or a combination thereof. In embodiments, the organism or situation is selected from among insects, pests, mold, pesticides and other chemicals, mildew, fungi, bacteria, viruses and other pathogens, an environmental condition, such as climate or soil conditions, or a geographic location. In certain embodiments, the plant cultivar is selected for root-specific, stem-specific, leaf-specific or flower-specific expression of a terpene synthase gene and/or paralog thereof, a terpene, a cannabinoid or a flavonoid based on identifying one or more terpene synthase genes, determining the expression profile of one or more terpene synthase genes, determining the production profile of one or more terpenes, determining the production profile of one or more cannabinoids, determining the production profile of one or more flavonoids or a combination thereof. Also provided herein are methods of breeding any of the plant cultivars selected according to the methods provided herein. Also provided herein are methods of cultivating a crop of any of the plant cultivars selected according to the methods provided herein. Also provided herein are methods of treatment comprising administering a plant cultivar selected according to the methods provided herein, or a portion thereof (e.g., seed, root, stem, flower) or an extract thereof (e.g., extracts from tissues of the plant cultivar) to a subject having a condition or disease in need of such treatment, whereby the condition or disease, or symptoms thereof, are ameliorated or reduced.

[0036] In certain embodiments of the methods provided herein, the methods include, based on identifying one or more terpene synthase genes and/or paralogs thereof, determining the expression profile of the one or more terpene synthase genes and/or paralogs thereof, determining the production profile of one or more terpenes, determining the production profile of one or more cannabinoids, determining the production profile of one or more flavonoids or a combination thereof, genetically modifying a plant cultivar whereby the expression of at least one terpene synthase gene and/or paralog thereof is inhibited or increased in the plant cultivar. In certain embodiments, the genetic modification increases the production of at least one terpene or decreases the production of at least one terpene in the plant cultivar. In embodiments, the plant cultivar is of a Cannabis cultivar. In certain aspects, the Cannabis cultivar is selected from among one or more of Type 1, Type 2, Type 3, Type 4 and Type 5 cultivars. In embodiments, one or more plant cultivars are of the family Rosidae.

[0037] In certain embodiments, the genetic modification increases the production of at least one cannabinoid or decreases the production of at least one cannabinoid in the plant cultivar. In embodiments, the genetic modification is for imparting a medicinal use. In embodiments, the genetic modification is for imparting resistance to an organism or situation. In certain embodiments, the genetic modification is for imparting affinity towards an organism or situation. In certain embodiments, the organism or situation is selected from among exposure to insects, pests, pesticides or other chemicals, mold, mildew, fungi, bacteria, viruses or other pathogens, an environmental condition, such as climate or soil conditions, or a geographic location. In embodiments, the genetic modification is for imparting root-specific, stem-specific, leaf-specific or flower-specific expression or inhibition of expression of a terpene synthase gene, a terpene, a cannabinoid or a flavonoid. The genetic modifications can be made by several methods known to those of skill in the art including, but not limited to, ZFN (Zinc Finger Nuclease), TALEN (Transcription Activator-Like Effector Nucleases), CRISPR-cas (cas9, cas12, cas13), Cre-Lox, MiRNA, SIRNA, ShRNA or a combination thereof.

[0038] In any of the methods provided herein, the unique subsequence of at least one terpene synthase gene or paralog thereof is outside the sequence encoding the active site of the terpene synthase gene or paralog thereof. In certain embodiments, the unique subsequence of at least one terpene synthase gene or paralog thereof is within the sequence encoding the active site of the terpene synthase gene or paralog thereof.

[0039] Also provided herein are methods of producing a daughter plant cultivar, that include:
[0040] analyzing two or more parent plant cultivars by the method provided herein;
[0041] based on identifying one or more terpene synthase genes and/or paralogs thereof, determining the expression profile of one or more terpene synthase genes and/or paralogs thereof, determining the production profile of one or more terpenes, determining the production profile of one or more cannabinoids, determining the production profile of one or more flavonoids or a combination thereof, selecting two parent plant cultivars for producing a desired daughter plant cultivar; and
[0042] inbreeding or outcrossing the parent plant cultivars to produce a daughter plant cultivar.

[0043] The term “daughter” cultivar is used interchangeably with “offspring” cultivar, i.e., the product of breeding parent cultivars.

[0044] In certain embodiments, the daughter plant cultivar produced has increased expression of at least one terpene synthase gene and/or paralog thereof or decreased expression of at least one terpene synthase gene and/or paralog thereof compared to at least one of the parent plant cultivars. In embodiments, the daughter plant cultivar produced has increased production of at least one terpene or decreased production of at least one terpene compared to at least one of the parent plant cultivars. In certain embodiments, the daughter plant cultivar produced has increased production of at least one flavonoid or decreased production of at least one flavonoid compared to at least one of the parent plant cultivars.

[0045] In certain embodiments, the parent plant cultivars and the daughter plant cultivar are Cannabis cultivars. In aspects, the Cannabis cultivar is selected from among one or more of Type 1, Type 2, Type 3, Type 4 and Type 5 cultivars. In embodiments, one or more plant cultivars (parent or daughter) are of the family Rosidae.

[0046] In embodiments, the daughter plant cultivar produced has increased production of at least one cannabinoid or decreased production of at least one cannabinoid compared to at least one of the parent plant cultivars.

[0047] In embodiments, the daughter plant cultivar has a medicinal use that is reduced or absent in the parent plant cultivars. In certain embodiments, the daughter plant cultivar has increased resistance to an organism or situation, where the resistance is reduced or absent in the parent plant cultivars. In embodiments, the daughter plant cultivar has increased affinity towards an organism or situation, where the affinity is reduced or absent in the parent plant cultivars. In embodiments, the organism or situation is selected from among insects, pests, mold, pesticides and other chemicals, mildew, fungi, bacteria, viruses and other pathogens, an environmental condition, such as climate or a soil condition, or a geographic location.

[0048] In embodiments, the daughter plant cultivar has increased root-specific, stem-specific, leaf-specific or flower-specific expression or inhibition of expression of a terpene synthase gene, a terpene, a cannabinoid or a flavonoid compared to at least one of the parent plant cultivars.

[0049] Also provided herein is a method of cultivating a crop, the method including:
[0050] analyzing at least one plant cultivar by any of the methods provided herein;
[0051] based on identifying one or more terpene synthase genes and/or paralogs thereof, determining the expression profile of one or more terpene synthase genes and/or paralogs thereof, determining the production profile of one or more terpenes, determining the production profile of one or more cannabinoids, determining the production profile of one or more flavonoids or a combination thereof, selecting a plant cultivar for producing a desired crop; and cultivating the crop.

[0052] Also provided herein is a method of treatment of a subject having a disease or condition, the method including:
[0053] analyzing at least one plant cultivar by any of the methods provided herein;
[0054] based on identifying one or more terpene synthase genes and/or paralogs thereof, determining the expression profile of one or more terpene synthase genes and/or paralogs thereof, determining the production profile of one or more terpenes, determining the production profile of one or more cannabinoids, determining the production profile of one or more flavonoids or a combination thereof, selecting a plant cultivar for a desired treatment of the disease or condition; and administering the plant cultivar or a portion or extract thereof to the subject.

[0055] Also provided herein are methods of genetically modifying a plant cultivar, that include:
[0056] analyzing the plant cultivar by the methods provided herein; and
   based on the analysis, altering at least one unique subsequence of at least one terpene synthase gene or a paralog thereof, whereby expression of the at least one terpene synthase gene or paralog thereof is increased or decreased compared to in the absence of the alteration and whereby one or more of the terpene synthase gene and/or paralog thereof expression profile, the terpene production profile, the cannabinoid production profile or the flavonoid production profile of the plant is modified. In certain embodiments, the genetically modified plant cultivar has increased expression of at least one terpene synthase gene or a paralog thereof or decreased expression of at least one terpene synthase gene or a paralog thereof, compared to the unmodified plant cultivar. In certain embodiments, the genetically modified plant cultivar has increased production of at least one terpene or decreased production of at least one terpene compared to the unmodified plant cultivar. In embodiments, the plant cultivar that is genetically modified is of a Cannabis cultivar. In aspects, the Cannabis cultivar is selected from among one or more of Type 1, Type 2, Type 3, Type 4 and Type 5 cultivars. In embodiments, one or more plant cultivars are of the family Rosidae. In embodiments, the genetically modified plant cultivar has increased production of at least one cannabinoid or decreased production of at least one cannabinoid compared to the unmodified plant cultivar.

[0057] In certain embodiments, the genetically modified plant cultivar has a medicinal use that is relatively reduced or absent in the unmodified plant cultivar. In embodiments, the genetically modified plant cultivar has increased resistance to an organism or situation, where the resistance is less than or absent in the unmodified plant cultivar. In embodiments, the genetically modified plant cultivar has increased affinity towards an organism or situation, where the affinity is reduced or absent in the unmodified plant cultivar. In embodiments, the organism or situation is selected from among exposure to insects, pests, mold, pesticides and other chemicals, mildew, fungi, bacteria, viruses and other pathogens, an environmental condition such as climate or soil conditions, or a geographic location. In embodiments, the genetically modified plant cultivar has increased root-specific, stem-specific, leaf-specific or flower-specific expression or inhibition of expression of a terpene synthase gene, a terpene, a cannabinoid or a flavonoid compared to the unmodified plant cultivar.

[0058] In certain embodiments, the genetic modification is by a method such as ZFN, TALEN, CRISPR-cas, Cre-Lox, MiRNA, SIRNA, ShRNA or a combination thereof. In embodiments, the expression of two or more terpene synthase genes and/or paralogs thereof is specifically increased or specifically inhibited.

[0059] Also provided herein is a method of analyzing a gene of a plant cultivar that belongs to a family of genes, wherein the gene comprises two or more exons, that includes:
[0060] (a) obtaining a nucleic acid sample from the plant cultivar;
[0061] (b) contacting the nucleic acid sample with at least one polynucleotide primer pair under amplification conditions, thereby preparing a mixture, wherein the polynucleotide primer pair hybridizes to a unique exon of the gene or a portion thereof, wherein the unique exon of the gene is different than the other exons of the gene and the unique exon of the gene is different than the exons of the other genes in the gene family;
[0062] (c) amplifying the mixture, thereby obtaining an amplified mixture; and
[0063] (d) analyzing the amplified mixture of (c), whereby the gene of the plant cultivar is identified and/or quantified in the amplified mixture.

[0064] Also provided herein is a method of analyzing a family of genes of a plant cultivar, wherein each gene of the family comprises two or more exons, that includes:
[0065] (a) obtaining a nucleic acid sample from the plant cultivar;
[0066] (b) contacting the nucleic acid sample with at least one polynucleotide primer pair under amplification conditions, thereby preparing a mixture, wherein the polynucleotide primer pair hybridizes to a unique exon of a gene or a portion thereof, wherein the unique exon of the gene is different than the other exons of the gene and the unique exon of the gene is different than the exons of the other genes in the family of genes;
[0067] (c) amplifying the mixture, thereby obtaining an amplified mixture; and
[0068] (d) analyzing the amplified mixture of (c), whereby at least one gene of the family of genes is identified and/or quantified in the amplified mixture.

[0069] In certain embodiments, wherein the family of genes comprises terpene synthase genes and/or paralogs thereof.

[0070] Also provided herein is a solid support that includes a single-stranded polynucleotide species, wherein the single-stranded polynucleotide species specifically binds to a unique subsequence of a terpene synthase gene or a paralog thereof, wherein the unique subsequence of the terpene synthase gene or paralog thereof is different than the other subsequences of the terpene synthase gene or paralog thereof and the unique subsequence of the terpene synthase gene or paralog thereof is different than the subsequences of other terpene synthase genes and/or paralogs thereof. In certain embodiments, the single-stranded polynucleotide species specifically binds to a conserved region of the unique subsequence. In embodiments, the unique subsequence is an exon, an intron, a portion within an exon or a portion within an intron. In certain embodiments, the unique subsequence is an exon or a portion within an exon. In embodiments, the single-stranded polynucleotide species is selected from among SEQ ID NOS: 1-1284. In embodiments, the single-stranded polynucleotide species is selected from among those set forth in SEQ ID NOS: 1-1284, or sequences that share 90%, 91%, 92%, 93%, 94%, 95%, 96%, 97%, 98%, 99% or more identity with any of the sequences set forth in SEQ ID NOS: 1-1284.

[0071] In embodiments, the terpene synthase gene or paralog thereof is a monoterpene synthase gene or paralog thereof, a diterpene synthase gene or paralog thereof or a sesquiterpene synthase gene or paralog thereof. In certain embodiments, the single-stranded polynucleotide species specifically binds to a unique subsequence of a terpene synthase gene or a paralog thereof from a Cannabis cultivar. In aspects, the Cannabis cultivar is selected from among one or more of Type 1, Type 2, Type 3, Type 4 and Type 5 cultivars. In embodiments, one or more plant cultivars are of the family Rosidae. In embodiments, the solid supports provided herein can be selected from among a bead, column, capillary, disk, filter, dipstick, membrane, wafer, comb, pin or a chip. In embodiments, the solid supports are made from a material selected from among silicon, silica, glass, controlled-pore glass (CPG), nylon, Wang resin, Merrifield resin, Sephadex, Sepharose, cellulose, magnetic beads, Dynabeads, a metal, a metal surface, a plastic or polymer or combinations thereof.

[0072] In certain embodiments, the unique subsequence of at least one terpene synthase gene or paralog thereof is outside the sequence encoding the active site of the terpene synthase gene or paralog thereof. In embodiments, the unique subsequence of at least one terpene synthase gene or paralog thereof is within the sequence encoding the active site of the terpene synthase gene or paralog thereof.

[0073] Also provided herein is a collection of the solid supports provided herein, wherein:
[0074] (a) each solid support in the collection contains a single-stranded polynucleotide species, wherein the single-stranded polynucleotide species specifically binds to a unique subsequence of a terpene synthase gene or a paralog thereof, wherein the unique subsequence of the terpene synthase gene or paralog thereof is different than the other subsequences of the terpene synthase gene or paralog thereof and the unique subsequence of the terpene synthase gene or paralog thereof is different than the subsequences of other terpene synthase genes and/or paralogs thereof; and
[0075] (b) the single-stranded polynucleotide species of each solid support in the collection is different than the single-stranded polynucleotide species of the other solid supports in the collection.

[0076] In certain embodiments, each single-stranded polynucleotide species in the collection specifically binds to a unique subsequence of the same terpene synthase gene or paralog thereof. In embodiments, each single-stranded polynucleotide species specifically binds to a unique subsequence of a terpene synthase gene or a paralog thereof that is different than the terpene synthase genes and/or paralogs thereof to which the other single-stranded polynucleotide species in the collection bind. In certain embodiments, the collection includes at least two single-stranded polynucleotide species that specifically bind to unique subsequences of the same terpene synthase gene and/or paralog thereof or at least two single-stranded polynucleotide species that specifically bind to unique subsequences of two different terpene synthase genes and/or paralogs thereof. In embodiments, each of the single-stranded polynucleotide species specifically binds to a conserved region of the unique subsequence. In certain embodiments, the unique subsequence is an exon, an intron, a portion within an exon or a portion within an intron. In embodiments, the subsequence is an exon or a portion within an exon. In certain embodiments, the single-stranded polynucleotide species are selected from among SEQ ID NOS: 1-1284. In embodiments, the single-stranded polynucleotide species are selected from among those set forth in SEQ ID NOS: 1-1284, or sequences that share 90%, 91%, 92%, 93%, 94%, 95%, 96%, 97%, 98%, 99% or more identity with any of the sequences set forth in SEQ ID NOS: 1-1284.

[0077] In certain embodiments, the terpene synthase genes and/or paralogs thereof are monoterpene synthase genes and/or paralogs thereof, diterpene synthase genes and/or paralogs thereof, sesquiterpene synthase genes and/or paralogs thereof, or any combination thereof. In certain embodiments of the collections provided herein, all or a portion of the single-stranded polynucleotide species specifically binds to a unique subsequence of a terpene synthase gene or a paralog thereof from a Cannabis cultivar. In aspects, the Cannabis cultivar is selected from among one or more of Type 1, Type 2, Type 3, Type 4 and Type 5 cultivars. In embodiments, one or more plant cultivars are of the family Rosidae.

[0078] In certain embodiments of the collections of solid supports provided herein, the solid supports are arranged in an array. In certain embodiments, the array is on a chip.

[0079] Also provided herein is a method of analyzing the terpene synthase gene profile of a plant cultivar, which includes:
[0080] (a) obtaining a nucleic acid sample from the plant cultivar;
[0081] (b) contacting the nucleic acid sample with the solid support collections provided herein, thereby preparing a mixture, wherein each single-stranded polynucleotide species of the collection can specifically bind to a unique subsequence of a terpene synthase gene or a paralog thereof, wherein the unique subsequence of the terpene synthase gene or a paralog thereof is different than the other subsequences of the terpene synthase gene or paralog thereof and the unique subsequence of the terpene synthase gene is different than the subsequences of other terpene synthase genes and/or paralogs thereof; and
[0082] (c) subjecting the mixture to conditions that facilitate specific binding of each single-stranded polynucleotide species of the collection to its corresponding unique subsequence of a terpene synthase gene or paralog thereof, when the unique subsequence is present in the nucleic acid sample, thereby obtaining a collection comprising bound single-stranded polynucleotide species; and
[0083] (d) analyzing the collection comprising bound single-stranded polynucleotide species of (c), whereby at least one terpene synthase gene or a paralog thereof is identified and/or quantified, and the terpene synthase gene profile of the plant cultivar is determined. In certain embodiments, each single-stranded polynucleotide species of the collection binds to a conserved region of its corresponding unique subsequence. In embodiments, the unique subsequence is an exon, an intron, a portion within an exon or a portion within an intron. In embodiments, the subsequence is an exon or a portion within an exon.

[0084] In certain embodiments, the identification in (d) is by a signal that is generated when a single-stranded polynucleotide species of the collection binds to its corresponding unique subsequence. In embodiments, the signal is an electrical signal, an electronic signal, a signal from an optical label, such as a chromophore, a dye, or a fluorescent label, or from a radiolabel. In certain embodiments, the single-stranded polynucleotide species are selected from among SEQ ID NOS: 1-1284. In embodiments, the single-stranded polynucleotide species are selected from among those set forth in SEQ ID NOS: 1-1284, or sequences that share 90%, 91%, 92%, 93%, 94%, 95%, 96%, 97%, 98%, 99% or more identity with any of the sequences set forth in SEQ ID NOS: 1-1284.

[0085] In embodiments, the terpene synthase genes and/or paralogs thereof that are identified and/or quantified in the terpene synthase gene profile are monoterpene synthase genes and/or paralogs thereof, diterpene synthase genes and/or paralogs thereof, sesquiterpene synthase genes and/or paralogs thereof or any combination thereof. In certain embodiments, the terpene synthase gene profile that is obtained, the terpene synthase gene and/or paralog expression profile and/or the terpene production profile of the plant cultivar is determined. In embodiments, the terpene synthase gene expression profile and/or the terpene production profile is of the root, flower, stem, leaf or any combination thereof.

[0086] In certain embodiments, based on the terpene synthase gene profile that is obtained and/or based on the terpene synthase gene expression profile that is determined and/or based on the terpene production profile that is determined, a lineage of the plant cultivar is assigned. In embodiments, based on the terpene synthase gene profile that is obtained and/or based on the terpene synthase gene expression profile that is determined and/or based on the terpene production profile that is determined, a medicinal use of the plant cultivar is assigned. In certain embodiments, based on the terpene synthase gene profile that is obtained and/or based on the terpene synthase gene expression profile that is determined and/or based on the terpene production profile that is determined, the plant cultivar is identified as resistant to an organism or situation, or having an affinity towards or favoring an organism or situation. In embodiments, the organism or situation is selected from among insects, pests, pesticides and other chemicals, mold, mildew, fungi, bacteria, viruses and other pathogens, an environmental condition, such as climate or soil conditions, or a geographic location. In certain embodiments, a plurality of plant cultivars are analyzed. In embodiments, the plant cultivars are of the same species. In embodiments, the plurality of plant cultivars are further classified based on lineage. In certain embodiments, the plurality of plant cultivars are further classified based on medicinal use.

[0087] In embodiments, one or more plant cultivars are of the family Rosidae. In embodiments, one or more of the plant cultivars is/are a Cannabis cultivar. In aspects, the Cannabis cultivar is selected from among one or more of Type 1, Type 2, Type 3, Type 4 and Type 5 cultivars. In certain embodiments, the monoterpene synthase gene and/or paralog profile of the Cannabis plant cultivar is obtained and, based on the monoterpene synthase gene and/or paralog profile obtained and/or the expression profile of the identified and/or quantified monoterpene synthase genes and/or paralogs thereof, the terpene production profile, the cannabinoid production profile, the flavonoid production profile, or the combination of two or more of the terpene production profile, the cannabinoid production profile and the flavonoid production profile of the Cannabis plant cultivar is determined. In certain embodiments, based on the monoterpene synthase gene and/or paralog profile obtained, the expression profile of the identified and/or quantified monoterpene synthase genes and/or paralogs thereof, the cannabinoid production profile, the flavonoid production profile, or the cannabinoid production profile and the flavonoid production profile that is determined, a lineage of the Cannabis plant cultivar is assigned. In certain embodiments, based on the monoterpene synthase gene and/or paralog profile obtained, the expression profile of the identified and/or quantified monoterpene synthase genes and/or paralogs thereof, the cannabinoid production profile, the flavonoid production profile, or the cannabinoid production profile and the flavonoid production profile that is determined, a medicinal use of the Cannabis plant cultivar is assigned.

[0088] In embodiments, a plurality of Cannabis plant cultivars are analyzed. In certain embodiments, the plurality of Cannabis plant cultivars are further classified based on lineage. In certain embodiments, the plurality of Cannabis plant cultivars are further classified based on medicinal use.

[0089] In certain embodiments, any of the plants assigned or classified according to a desired property, such as lineage or a medicinal use or as resistant to or favoring an organism or condition, can further be selected and used in methods provided herein, such as methods of breeding, methods of cultivating a crop, methods of treatment, or methods of genetically modifying a plant cultivar as provided herein. In certain embodiments, at least one plant cultivar that is analyzed produces one or more terpenes selected from among α-Bisabolol, endo-Borneol, Camphene, Camphor, 3-Carene, Caryophyllene, Caryophyllene Oxide, α-Cedrene, Cedrol, Citronellol, Eucalyptol (1,8 Cineole), α-Farnesene, β-Farnesene, Fenchol, Fenchone, Geraniol, Geranyl Acetate, Guaiol, Humulene, Isoborneol, Isopulegol, D-Limonene, Linalool, Menthol, β-Myrcene, Nerol, trans-Nerolidol, cis-Nerolidol, trans-Ocimene, cis-Ocimene, α-Phellandrene, Phytol 1, Phytol 2, α-Pinene, β-Pinene, Pulegone, Sabinene, Sabinene Hydrate, α-Terpinene, γ-Terpinene, α-Terpineol, Terpinolene, Valencene, γ-Elemene, Z-Ocimene, E-Ocimene, α-Thujone, Thujene, γ-Muurolene, 2-Norpinene, α-Santalene, α-Selinene, Germacrene D, Eudesma-3,7(11)-diene, δ-Cadinol, trans-α-Beramotene, trans-2-pinanol, p-cymen-8-ol, Sativene, Cyclosativene, α-guaiene, γ-gurjunene, α-bulnesene, Bulnesol, α-eudesmol, β-eudesmol, Hedycaryol, γ-eudesmol, Alloaromadendrene, p-cymene, α-Copaene, β-Elemene, α-Cubebene, Linalyl acetate, Bornyl acetate, Heptacosane, Tricosane, S-Limonene, (−)-Thujopsene, Hashenene 5,5-dimethyl-1-vinylbicyclo[2.1.1]hexane, (−)-englerin A and Artemisinin.

[0090] In certain embodiments, a terpene production profile is determined for one or more terpenes selected from among α-Bisabolol, endo-Borneol, Camphene, Camphor, 3-Carene, Caryophyllene, Caryophyllene Oxide, α-Cedrene, Cedrol, Citronellol, Eucalyptol (1,8 Cineole), α-Farnesene, β-Farnesene, Fenchol, Fenchone, Geraniol, Geranyl Acetate, Guaiol, Humulene, Isoborneol, Isopulegol, D-Limonene, Linalool, Menthol, β-Myrcene, Nerol, trans-Nerolidol, cis-Nerolidol, trans-Ocimene, cis-Ocimene, α-Phellandrene, Phytol 1, Phytol 2, α-Pinene, β-Pinene, Pulegone, Sabinene, Sabinene Hydrate, α-Terpinene, γ-Terpinene, α-Terpineol, Terpinolene, Valencene, γ-Elemene, Z-Ocimene, E-Ocimene, α-Thujone, Thujene, γ-Muurolene, 2-Norpinene, α-Santalene, α-Selinene, Germacrene D, Eudesma-3,7(11)-diene, δ-Cadinol, trans-α-Beramotene, trans-2-pinanol, p-cymen-8-ol, Sativene, Cyclosativene, α-guaiene, γ-gurjunene, α-bulnesene, Bulnesol, α-eudesmol, β-eudesmol, Hedycaryol, γ-eudesmol, Alloaromadendrene, p-cymene, α-Copaene, β-Elemene, α-Cubebene, Linalyl acetate, Bornyl acetate, Heptacosane, Tricosane, S-Limonene, (−)-Thujopsene, Hashenene 5,5-dimethyl-1-vinylbicyclo[2.1.1]hexane, (−)-englerin A and Artemisinin. In certain embodiments, at least one plant cultivar that is analyzed expresses one or more terpene synthases selected from among TPS11, TPS11-like, TPS12, TPS12-like, TPS13, TPS13-like, TPS13-like2, TPS14, TPS15, TPS16, TPS17, TPS18, TPS19, TPS1, TPS20, TPS23, TPS24, TPS2, TPS30, TPS30-like, TPS32, TPS33, TPS36, TPS37, TPS38, TPS39, TPS3, TPS40, TPS41, TPS42, TPS43, TPS44, TPS45, TPS46, TPS47, TPS48, TPS49, TPS4, TPS4-like, TPS50, TPS51, TPS52, TPS53, TPS54, TPS55, TPS56, TPS57, TPS58, TPS59, TPS5, TPS5, TPS60, TPS61, TPS62, TPS63, TPS64, TPS6, TPS6-like, TPS7, TPS8, TPS8, TPS8-like, TPS9, TPS9, TPS9-like and TPS9-like2. In certain embodiments, the one or more terpene synthases are selected from among TPS11JL, TPS11-likeJL, TPS12JL, TPS12-likeJL, TPS13JL, TPS13-likeJL, TPS13-like2JL, TPS14JL, TPS15JL, TPS16JL, TPS17JL, TPS18JL, TPS19JL, TPS1JL, TPS20JL, TPS23JL, TPS24JL, TPS2JL, TPS30JL, TPS30-likeJL, TPS32JL, TPS33JL, TPS36JL, TPS37JL, TPS38JL, TPS39JL, TPS3JL, TPS40JL, TPS41JL, TPS42JL, TPS43JL, TPS44JL, TPS45JL, TPS46JL, TPS47JL, TPS48JL, TPS49JL, TPS4JL, TPS4-likeJL, TPS50JL, TPS51JL, TPS52JL, TPS53JL, TPS54JL, TPS55JL, TPS56JL, TPS57JL, TPS58JL, TPS59JL, TPS5JL, TPS5JL, TPS60JL, TPS61JL, TPS62JL, TPS63JL, TPS64JL, TPS6JL, TPS6-likeJL, TPS7JL, TPS8JL, TPS8JL, TPS8-likeJL, TPS9JL, TPS9JL, TPS9-likeJL and TPS9-like2JL.

[0091] In certain embodiments, the method further includes, based on obtaining the terpene synthase gene and/or paralog profile, determining the expression profile of one or more terpene synthase genes and/or paralogs thereof, determining the production profile of one or more terpenes, determining the production profile of one or more cannabinoids, determining the production profile of one or more flavonoids or a combination thereof, selecting a plant cultivar for in-breeding or out-crossing. In embodiments, the plant cultivar is selected for its lineage that is assigned based on obtaining the terpene synthase gene profile, determining the expression profile of one or more terpene synthase genes, determining the production profile of one or more terpenes, determining the production profile of one or more cannabinoids, determining the production profile of one or more flavonoids or a combination thereof. In certain embodiments, the plant cultivar is selected for a medicinal use that is assigned based on obtaining the terpene synthase gene profile, determining the expression profile of one or more terpene synthase genes, determining the production profile of one or more terpenes, determining the production profile of one or more cannabinoids, determining the production profile of one or more flavonoids or a combination thereof. In embodiments, the plant cultivar is selected for resistance to an organism or situation that is identified based on obtaining the terpene synthase gene profile, determining the expression profile of one or more terpene synthase genes, determining the production profile of one or more terpenes, determining the production profile of one or more cannabinoids, determining the production profile of one or more flavonoids or a combination thereof. In certain embodiments, the plant cultivar is selected for having an affinity towards an organism or situation that is identified based on obtaining the terpene synthase gene profile, determining the expression profile of one or more terpene synthase genes, determining the production profile of one or more terpenes, determining the production profile of one or more cannabinoids, determining the production profile of one or more flavonoids or a combination thereof. In embodiments, the organism or situation is selected from among insects, pests, mold, mildew, fungi, bacteria, an environmental condition or a geographic location.

[0092] In certain embodiments, the plant cultivar is selected for root-specific, stem-specific, leaf-specific or flower-specific expression of a terpene synthase, a terpene, a cannabinoid or a flavonoid based on obtaining the terpene synthase gene profile, determining the expression profile of one or more terpene synthase genes, determining the production profile of one or more terpenes, determining the production profile of one or more cannabinoids, determining the production profile of one or more flavonoids or a combination thereof. In certain embodiments, based on obtaining the terpene synthase gene profile, determining the expression profile of one or more terpene synthase genes, determining the production profile of one or more terpenes, determining the production profile of one or more cannabinoids, determining the production profile of one or more flavonoids or a combination thereof, a plant cultivar is selected for genetic modification whereby the expression of at least one terpene synthase gene is inhibited or increased in the plant cultivar. In certain embodiments, the genetic modification increases the production of at least one terpene or decreases the production of at least one terpene in the plant cultivar. In embodiments, the plant cultivar is of a Cannabis cultivar.

[0093] In certain embodiments, the genetic modification increases the production of at least one cannabinoid or decreases the production of at least one cannabinoid in the plant cultivar. In embodiments, the genetic modification is for imparting a medicinal use. In certain embodiments, the genetic modification is for imparting resistance to an organism or situation. In embodiments, the genetic modification is for imparting affinity towards an organism or situation. In certain embodiments, the organism or situation is selected from among insects, pests, pesticides and other chemicals, mold, mildew, fungi, bacteria, viruses and other pathogens an environmental condition or a geographic location.

[0094] In certain embodiments, the genetic modification is for imparting root-specific, stem-specific, leaf-specific or flower-specific expression or inhibition of expression of a terpene synthase gene, a terpene, a cannabinoid or a flavonoid. In embodiments, the genetic modification is by a method that includes ZFN (Zinc Finger Nuclease), TALEN (Transcription Activator-Like Effector Nucleases), CRISPR-cas, Cre-Lox, MiRNA, SIRNA, ShRNA or a combination thereof. In certain embodiments, the unique subsequence of at least one terpene synthase gene is outside the sequence encoding the active site of the terpene synthase gene.

[0095] The plant cultivars analyzed and/or genetically modified according to the methods provided herein can be used in methods of breeding, of cultivating crops, of treatment and other uses as provided herein. In certain embodiments, when the plant cultivars are genetically modified, they can be screened for the existence of the genetic modification using any of the solid supports or collections of solid supports according to any of the methods provided herein. In embodiments, the existence of a mutation in a plant cultivar can be detected using any of the solid supports or collections of solid supports according to any of the methods provided herein.

[0096] Also provided herein are kits that include:
[0097] one or more single-stranded polynucleotide species, wherein each single-stranded polynucleotide species specifically binds to a unique subsequence of a terpene synthase gene, wherein the unique subsequence of the terpene synthase gene is different than the other subsequences of the terpene synthase gene and the unique subsequence of the terpene synthase gene is different than the subsequences of other terpene synthase genes; and
[0098] instructions for use in obtaining a terpene synthase gene profile of a plant cultivar and/or for detecting a mutation in one or terpene synthase genes of a plant cultivar. In certain embodiments, the single-stranded polynucleotide species specifically binds to a conserved region of the unique subsequence. In embodiments, the genes include paralogs. In certain embodiments, the unique subsequence is an exon, an intron, a portion within an exon or a portion within an intron. In embodiments, the unique subsequence is an exon or a portion within an exon.

[0099] In certain embodiments of the kits provided herein, the one or more single-stranded polynucleotide species are selected from among SEQ ID NOS: 1-1284. In embodiments, the one or more single-stranded polynucleotide species are selected from among those set forth in SEQ ID NOS: 1-1284, or sequences that share 90%, 91%, 92%, 93%, 94%, 95%, 96%, 97%, 98%, 99% or more identity with any of the sequences set forth in SEQ ID NOS: 1-1284.

[0100] In embodiments, the terpene synthase gene is a monoterpene synthase gene or a paralog thereof, a diterpene synthase gene or a paralog thereof, or a sesquiterpene synthase gene or a paralog thereof. In certain embodiments, each single-stranded polynucleotide species specifically binds to a unique subsequence of a terpene synthase gene from a Cannabis cultivar.

[0101] In certain embodiments, the kits provided herein further include a label for detecting the specific binding of each single-stranded polynucleotide species to a corresponding unique subsequence of a terpene synthase. In certain embodiments, if more than one single-stranded polynucleotide species is present, the single-stranded polynucleotide species bind to different unique subsequences of the same terpene synthase gene, to different unique subsequences of different terpene synthase genes, or to different unique subsequences of the same terpene synthase gene and to different unique subsequences of different terpene synthase genes. In certain embodiments, the unique subsequence of at least one terpene synthase gene is outside the sequence encoding the active site of the terpene synthase gene. In certain embodiments, the unique subsequence of at least one terpene synthase gene is within the sequence encoding the active site of the terpene synthase gene.

[0102] Also provided herein are kits that include:
[0103] one or more polynucleotide primer pairs, wherein each polynucleotide primer pair hybridizes to a unique subsequence of a terpene synthase gene, wherein the unique subsequence of the terpene synthase gene is different than the other subsequences of the terpene synthase gene and the unique subsequence of the terpene synthase gene is different than the subsequences of other terpene synthase genes; and
[0104] instructions for use in analyzing the nucleic acid of a plant cultivar.

[0105] In certain embodiments, each of the primers of a polynucleotide primer pair hybridizes to a conserved region of the subsequence and the hybridized polynucleotide primer pair flanks a variable region of the subsequence. In embodiments, the unique subsequence is an exon, an intron, a portion within an exon or a portion within an intron. In certain embodiments, the unique subsequence is an exon or a portion within an exon. In certain embodiments, each primer pair is selected from among SEQ ID NOS: 1-1284. In embodiments, each primer pair is selected from among SEQ ID NOS: 1-1284, or sequences that share 90%, 91%, 92%, 93%, 94%, 95%, 96%, 97%, 98%, 99% or more identity with any of the sequences set forth in SEQ ID NOS: 1-1284.

[0106] In embodiments, the terpene synthase gene is a monoterpene synthase gene, a diterpene synthase paralog or a sesquiterpene synthase paralog. In certain embodiments, each polynucleotide primer pair specifically binds to a unique subsequence of a terpene synthase paralog from a Cannabis cultivar. In certain embodiments, if more than one polynucleotide primer pair is present, each polynucleotide primer pair binds to different unique subsequences of the same terpene synthase paralog, to different unique subsequences of different terpene synthase paralogs, or to different unique subsequences of the same terpene synthase paralog and to different unique subsequences of different terpene synthase paralogs.

[0107] In embodiments, the kits provided herein further include reagents for amplification of nucleic acid from a plant cultivar. In embodiments, the unique subsequence of at least one terpene synthase paralog is outside the sequence encoding the active site of the terpene synthase paralog. In embodiments, the unique subsequence of at least one terpene synthase paralog is within the sequence encoding the active site of the terpene synthase paralog.

[0108] Also provided herein are methods of preparing primers for uniquely amplifying a gene or a paralog thereof, which includes:
[0109] (a) identifying, within at least one exon of the gene or paralog thereof, a first sequence and a second sequence that are conserved for that gene or paralog thereof, wherein the first conserved sequence and the second conserved sequence flank a sequence that is not conserved; and
[0110] (b) preparing a pair of primers, wherein:
   [0111] (i) one primer hybridizes to the first conserved sequence and one primer hybridizes to the second conserved sequence;
   [0112] (ii) each primer, when hybridized to a sequence of the gene or paralog thereof that is not its target conserved sequence, has at least 5 mismatches with the sequence; and
   [0113] (iii) each primer, when hybridized to a sequence of the gene or paralog thereof that is not its target conserved sequence, has at least 3 mismatches with the sequence within 5 bases from the 3′-end of the primer.

[0114] In certain embodiments, the melting temperature of each primer hybridized to its target conserved sequence is between about 57° C. to about 63° C. In embodiments, the difference between the melting temperatures of each primer of the primer pair hybridized to its target sequence is 3° C. or less.

[0115] In certain embodiments, for at least one exon of the gene or paralog thereof, more than one primer pair is prepared, wherein each primer pair amplifies a difference sequence within the exon of the gene or paralog thereof. In embodiments, more than one primer pair is prepared and at least two primer pairs amplify sequences within two different exons of the gene or paralog thereof. In certain embodiments, the gene or paralog thereof is of a terpene synthase gene.

[0116] In certain embodiments of any of the methods provided herein, the size of the product (amplicon) that is amplified by any of the pairs of primers provided herein, including primers prepared by any of the methods provided herein, is less than 300 base pairs, such as between about 30 base pairs to about 295 base pairs, or between about 40 base pairs to about 200 base pairs, or between about 50 base pairs to about 150 base pairs. For example, the size of the product (amplicon) that is amplified by any of the pairs of primers provided herein, including primers prepared by any of the methods provided herein, can be, e.g., about 30, 40, 45, 50, 55, 60, 65, 70, 75, 80, 85, 90, 95, 100, 105, 110, 115, 120, 125, 130, 135, 140, 145, 150, 155, 160, 165, 170, 175, 180, 185, 190, 195, 200, 205, 210, 215, 220, 225, 230, 235, 240, 245, 250, 255, 260, 265, 270, 275, 280, 285, 290 or 295 base pairs, within +/− about 10% of each of the recited sizes of the amplicons.

[0117] Also provided herein are genetically modified plant cultivars produced by any of the methods provided herein. The genetically modified plant cultivars can, in certain embodiments, be screened for the presence of a genetic modification using the solid supports and collections of solid supports according to the methods provided herein. In embodiments, the genetically modified plant cultivars can be used in the breeding methods, the methods of cultivating crops and the methods of treatment provided herein. In embodiments, a genetically modified plant cultivar is a Cannabis cultivar.

[0118] Also provided herein are methods of identifying whether a plant cultivar contains a terpene synthase gene or a paralog thereof that has been genetically modified, which includes:
[0119] (a) obtaining a nucleic acid sample from the plant cultivar;
[0120] (b) contacting the nucleic acid sample with any of the solid supports provided herein, or any of the collections of solid supports provided herein, thereby preparing a mixture, wherein at least one single-stranded polynucleotide species of the solid support or the collection can specifically bind to at least one genetically modified unique subsequence of a terpene synthase gene or a paralog thereof in the nucleic acid sample, when the at least one genetically modified unique subsequence is present, wherein the at least one genetically modified unique subsequence of the terpene synthase gene or a paralog thereof is different than the other subsequences of the terpene synthase gene or paralog thereof and the unique subsequence of the terpene synthase gene is different than the subsequences of other terpene synthase genes and/or paralogs thereof; and
[0121] (c) subjecting the mixture to conditions that facilitate specific binding of the at least one single-stranded polynucleotide species of the solid support or the collection to its corresponding at least one genetically modified unique subsequence of a terpene synthase gene or paralog thereof in the nucleic acid sample, when the at least one genetically modified unique subsequence is present in the nucleic acid sample; and
[0122] (d) detecting at least one single-stranded polynucleotide species of the solid support or the collection as being specifically bound to its corresponding genetically modified unique subsequence of a terpene synthase gene or paralog thereof in the nucleic acid sample wherein, if the at least one genetically modified unique subsequence is detected as specifically bound to a solid support or a collection in (c), the plant cultivar is identified as comprising a genetically modified terpene synthase or paralog thereof.

[0123] In certain embodiments, the detecting in (d) is by a signal that is generated when a single-stranded polynucleotide species of the collection binds to its corresponding genetically modified unique subsequence. In embodiments, the signal is an electrical signal, an electronic signal, a signal from an optical label, such as a dye or intercalator or fluorescent label, or from a radiolabel.

[0124] In certain embodiments, the method further includes, if the plant cultivar is identified as containing a genetically modified terpene synthase or paralog thereof, determining the type of genetic modification. In embodiments, the type of genetic modification is selected from among deletions, insertions and substitutions. In certain embodiments, the genetic modification includes at least one substitution. In embodiments, the at least one substitution is in a unique subsequence that expresses the active site of the terpene synthase, or a portion thereof.

[0125] In embodiments, the plant cultivar is a genetically modified plant cultivar provided herein or obtained by the methods provided herein. In embodiments, one or more plant cultivars are of the family Rosidae. In certain embodiments, the plant cultivar is a Cannabis cultivar. In aspects, the Cannabis cultivar is selected from among one or more of Type 1, Type 2, Type 3, Type 4 and Type 5 cultivars. In certain embodiments, at least one genetically modified unique subsequence is an exon, or contains an exon.

[0126] Certain embodiments are described further in the following description, examples, claims and drawings.

### BRIEF DESCRIPTION OF THE DRAWINGS

[0127] The drawings illustrate embodiments of the technology and are not limiting. For clarity and ease of illustration, the drawings are not made to scale, and, in some instances, various aspects may be shown exaggerated or enlarged to facilitate an understanding of particular embodiments.

[0128] FIG. 1 shows the hybridization/melting characteristics of the primers listed in Table 2.

[0129] FIG. 2 is a heatmap showing the presence, absence, and copy number variation of TPS genes (within 95% sequence identity) across six Cannabis genome assemblies.

[0130] FIG. 3 depicts the results of a LAMP assay for detecting the terpene synthase csTPS37FN in nucleic acid from Cannabis plant samples.

[0131] FIG. 4 provides examples of terpene synthases that can be analyzed and applied in uses according to the methods and compositions provided herein, along with the Citations/Accession Numbers that describe the synthases.

[0132] FIG. 5 provides examples of nucleic acid sequences encoding terpene synthases that can be analyzed and applied in uses according to the methods and compositions provided herein.

[0133] FIG. 6 provides a Table as described herein.

[0134] FIG. 7 provides Tables as described herein.

[0135] FIG. 8 provides a Table as described herein.

### DETAILED DESCRIPTION

### Terpenes

[0136] Terpenes are aromatic compounds that are a class of unsaturated compounds found in the essential oils of many plants. As used herein, the term “plant” or “plant cultivar” includes any and all plant species that produce terpenes, including for example, angiosperms, any species of woody, ornamental or decorative, crop or cereal, fruit or vegetable, fruit plant or vegetable plant, flower or tree, macroalga or microalga, phytoplankton and photosynthetic algae (e.g., green algae Chlamydomonas reinhardtii). A plant also refers to a unicellular plant (e.g. microalga) and a plurality of plant cells that are largely differentiated into a colony (e.g. volvox) or a structure that is present at any stage of a plant's development. Such structures include, but are not limited to, a fruit, a flower, a seed, a shoot, a stem, a leaf, a root, plant tissue sand the like. As used herein, the term “plant tissue” includes differentiated and undifferentiated tissues of plants including those present in roots, shoots, leaves, pollen, seeds and tumors, as well as cells in culture (e.g., single cells, protoplasts, embryos, callus, etc.). Plant tissue can be in planta, in organ culture, tissue culture, or cell culture. Any of the foregoing plant cultivars, portions thereof or extracts thereof are contemplated for use, e.g., as plant samples, in the methods provided herein.

[0137] The term “strain” is used interchangeably herein with “cultivar” (cultivated variety), “plant cultivar” or “variety” and refers to a species of a family of plants, such as a species of a Cannabis plant. A cultivar generally has been cultivated for desirable characteristics, such as color, shape, smell, medicinal use, etc., that are maintained during propagation. Phrases such as “plurality of strains of a plant” or “plurality of cultivars of a plant” or equivalent phrases, as used herein, refers to multiple species of the same plant, e.g., multiple species of Cannabis plant cultivars such as Jamaican Lion, Purple Kush, CannaTsu, Finola, Valley Fire, Cherry Chem and the like. The terms “strain,” “cultivar,” (cultivated variety), “plant cultivar” or “variety” also can be used interchangeably herein with “chemovar,” such as when the plant species is characterized by its chemical or biological profile, such as one or more of a terpene synthase gene profile, a terpene synthase expression profile, a terpene profile, a flavonoid profile, a cannabinoid profile or any combination thereof. The term “profile,” as used herein, can refer to the type and/or abundance (level of expression, in the case of a gene such as a terpene synthase) of each analyte of the group that is profiled, e.g., each terpene in a group of terpenes of a plant cultivar that are profiled, or each terpene synthase in a group of terpene synthases of a plant cultivar that are profiled.

[0138] The molecular structures of terpenes consist of five carbon isoprene units. Mono terpenes contain 2 isoprene units, sesquiterpenes contain 3 isoprene units, and diterpenes contain 4 isoprene units. These aromatic compounds create the characteristic scent of many plants, such as Cannabis, pine, and lavender, as well as fresh orange peel. The fragrance of most plants is due to a combination of terpenes. Terpenes play central roles in plant communication with the environment, including attracting beneficial organisms, repelling harmful ones, and communication between plants. In nature, these terpenes can protect the plants from animal grazing or infectious germs.

[0139] Terpenes also can offer health benefits to animals, including humans. Terpenes and essential oils have been studied over decades as remedies for a variety of medical conditions and have been found to have a wide range of biological and therapeutic properties. For example, terpenes are known to have antioxidant, anti-inflammatory, antibacterial, antiviral, anti-anxiety, antinociceptive, analgesic, antihypertensive, sedative, antidepressant, neuro protective and gastro protective properties. More recently, researchers have looked at the individual terpenes in essential oils, to understand which terpenoids might be contributing to their overall biological and medical properties. Terpenes in essential oils can either exert their individual effects in the oil or they can operate synergistically or agonistically with other oil constituents.

[0140] In Cannabis plants, such as C. sativa, more than 100 terpenes have been identified. Monoterpenes and sesquiterpenes are responsible for most of the odor and flavor properties of C. sativa, meaning that variation in terpene content is an important differentiator between cultivars. Therefore, there has long been interest from breeders in creating cultivars with particular terpene profiles. Further, there is a growing body of preliminary evidence that terpenes play a role in the various effects of C. sativa on humans, either directly or by modulating the effect of the cannabinoids, implying that medical C. sativa breeding likely will include terpene targets.

[0141] Given the important role of terpenes in plants, there is a need for methodologies to reliably identify plants that have desired terpene production profiles (used interchangeably herein with terpene profiles) for agricultural, industrial or medicinal use. The terms “terpene (production) profile,” “cannabinoid (production) profile,” “flavonoid (production) profile,” as used herein, refers to the types and amounts of terpenes, cannabinoids or flavonoids, respectively, in a plant cultivar, and can also include ratios of the relative abundance of two or more terpenes, cannabinoids or flavonoids, respectively.

[0142] Terpene synthases (TPSs) are the key enzymes responsible for the biosynthesis of terpenes. Provided herein are molecular markers that permit reliable identification and/or quantitation of the TPS gene profile of a plant cultivar, thereby permitting the identification and selection of plants for use in methods of genetic modification, methods of screening, and methods of use in breeding, crop cultivating, therapeutic methods and other methods as provided herein.

### Terpene Synthases

[0143] The terpene synthase (TPS) family is a family of genes that encodes enzymes that use similar substrates and generate similar products but have diverged in different lineages to provide a wide variety of terpenes and mixtures of terpenes. Some estimates suggest that more than 25,000 terpene structures may exist in plants. Analysis of the several plant genomes that have been sequenced and annotated indicates that, with the exception of the moss Physcomitrella patens, which has a single functional TPS gene, the TPS gene family is a mid-size family, with gene numbers ranging from approximately 20 to 150 in sequenced plant genomes.

[0144] Isopentenyl diphosphate (IPP) is the common precursor of all terpenes. IPP is isomerized to give dimethylallyl pyrophosphate (DMAPP). DMAPP either serves as the substrate for hemiterpene biosynthesis or fuses with one IPP unit to form geranyl diphosphate (GPP). The condensation of one GPP molecule with one IPP molecule gives farnesyl diphosphate (FPP), and the condensation of one FPP molecule with one IPP molecule will give geranylgeranyl diphosphate (GGPP). GPP, FPP and GGPP are the precursors for monoterpenes, sesquiterpenes and diterpenes, respectively. While these prenyl diphosphates in the trans-configuration have been believed to be the ubiquitous natural substrates for terpene synthases, recent studies showed that two prenyl diphosphates in the cis-configuration, neryl diphosphate (NPP) and Z,Z-FPP, are also the naturally occurring substrates of terpene synthases. Isoprene synthase, monoterpene synthases, sesquiterpene synthases, and diterpene synthases convert DMAPP, GPP (or NPP), FPP (or Z,Z-FPP), and GGPP to isoprene, monoterpenes, sesquiterpenes and diterpenes, respectively.

[0145] Based on the reaction mechanism and products formed, plant TPSs can be classified into two groups: Class I and Class II. CPS is a representative of class II TPSs: it catalyzes the formation of CPP through protonation-induced cyclization of GGPP. However, most known plant TPSs are Class I TPSs. In the initial step of the enzymatic reactions catalyzed by Class I TPSs, the prenyl diphosphate is ionized and carbocation intermediates are formed.

[0146] A striking feature of class I TPS enzymes is that, because of the stochastic nature of bond rearrangements that follow the creation of the unusual carbocation intermediates, a single TPS enzyme using a single substrate often gives rise to multiple products. The central feature of this evolutionary plasticity is that change of just a single amino acid in the active site can lead to a different product profile. Most terpenes are secondary metabolites whose synthesis evolved in response to selection for increased fitness for some ecological niche. Consistent with the need (for terpene production profiles of a plant cultivar, e.g.) to be environmentally adaptive, the TPS family has evolved such that new TPS with differing product profiles can be derived from existing enzymes by changes to just a few amino acids.

[0147] Angiosperms, of which Cannabis is an example, tend to have moderately large families of these enzymes, with both divergent and convergent evolution taking place. Some of these TPS enzymes appear to be a result of recent duplications, i.e., they are paralogs of each other. Other TPS enzymes can be quite distant from each other: for example, there is a common “terpenoid synthase fold,” but sequence divergence across the family can be very high, just staying within the constraints of maintaining an overall fold and basic configuration of the active site.

[0148] Generally, the product profile of a given TPS enzyme cannot be determined from sequence similarity with other TPS enzymes. For example, two paralogous diterpene synthases in Norway spruce (Picea abies), isopimaradiene synthase and levopimaradiene/abietadiene synthase, although 91% identical at the amino acid level, differ in their terpene product profiles: one is a single-product enzyme, whereas the other is a multiproduct enzyme that forms completely different products. In addition, a one-amino acid mutation was found to switch the levopimaradiene/abietadiene synthase into producing isopimaradiene and sandaracopimaradiene and none of its normal products. Four mutations were sufficient to reciprocally reverse the product profiles for both of these paralogous enzymes, while maintaining catalytic efficiencies similar to the wild-type enzymes (Keeling et al., Proc. Natl. Acad. Sci. USA, 105(3):1085-1090 (2008).

[0149] Thus, given the widely differing terpene profiles of the TPS enzymes, even when there is a relatively high degree of overall sequence identity, there is a need to reliably identify the individual TPS genes that are present in the TPS gene profile of a plant cultivar. The methods provided herein are based on primer sets that amplify unique subsequences, such as exons or portions thereof, within each TPS gene, thereby providing a higher order differentiation that permits sensitive detection and/or quantification of each TPS gene in the plant cultivar, regardless of the overall sequence identity between the TPS genes.

[0150] Any terpene synthase, or combinations of terpene synthases, are contemplated for analysis and/or applications/uses according to the methods and compositions provided herein. In embodiments, terpene synthases contemplated herein for the compositions and methods of analyses/applications/uses include terpene synthases that produce, singly or in combinations of two or more terpene synthases, one or more terpenes selected from among α-Bisabolol, endo-Borneol, Camphene, Camphor, 3-Carene, Caryophyllene, Caryophyllene Oxide, α-Cedrene, Cedrol, Citronellol, Eucalyptol (1,8 Cineole), α-Farnesene, β-Farnesene, Fenchol, Fenchone, Geraniol, Geranyl Acetate, Guaiol, Humulene, Isoborneol, Isopulegol, D-Limonene, Linalool, Menthol, β-Myrcene, Nerol, trans-Nerolidol, cis-Nerolidol, trans-Ocimene, cis-Ocimene, α-Phellandrene, Phytol 1, Phytol 2, α-Pinene, β-Pinene, Pulegone, Sabinene, Sabinene Hydrate, α-Terpinene, γ-Terpinene, α-Terpineol, Terpinolene, Valencene, γ-Elemene, Z-Ocimene, E-Ocimene, α-Thujone, Thujene, γ-Muurolene, 2-Norpinene, α-Santalene, α-Selinene, Germacrene D, Eudesma-3,7(11)-diene, δ-Cadinol, trans-α-Beramotene, trans-2-pinanol, p-cymen-8-ol, Sativene, Cyclosativene, α-guaiene, γ-gurjunene, α-bulnesene, Bulnesol, α-eudesmol, β-eudesmol, Hedycaryol, γ-eudesmol, Alloaromadendrene, p-cymene, α-Copaene, β-Elemene, α-Cubebene, Linalyl acetate, Bornyl acetate, Heptacosane, Tricosane, S-Limonene, (−)-Thujopsene, Hashenene 5,5-dimethyl-1-vinylbicyclo[2.1.1]hexane, (−)-englerin A and Artemisinin.

[0151] In certain embodiments, the one or more terpene synthases are selected from among those designated as TPS11, TPS11-like, TPS12, TPS12-like, TPS13, TPS13-like, TPS13-like2, TPS14, TPS15, TPS16, TPS17, TPS18, TPS19, TPS1, TPS20, TPS23, TPS24, TPS2, TPS30, TPS30-like, TPS32, TPS33, TPS36, TPS37, TPS38, TPS39, TPS3, TPS40, TPS41, TPS42, TPS43, TPS44, TPS45, TPS46, TPS47, TPS48, TPS49, TPS4, TPS4-like, TPS50, TPS51, TPS52, TPS53, TPS54, TPS55, TPS56, TPS57, TPS58, TPS59, TPS5, TPS5, TPS60, TPS61, TPS62, TPS63, TPS64, TPS6, TPS6-like, TPS7, TPS8, TPS8, TPS8-like, TPS9, TPS9, TPS9-like and TPS9-like2. In certain embodiments, the one or more terpene synthases are selected from among those designated as TPS11JL, TPS11-likeJL, TPS12JL, TPS12-likeJL, TPS13JL, TPS13-likeJL, TPS13-like2JL, TPS14JL, TPS15JL, TPS16JL, TPS17JL, TPS18JL, TPS19JL, TPS1JL, TPS20JL, TPS23JL, TPS24JL, TPS2JL, TPS30JL, TPS30-likeJL, TPS32JL, TPS33JL, TPS36JL, TPS37JL, TPS38JL, TPS39JL, TPS3JL, TPS40JL, TPS41JL, TPS42JL, TPS43JL, TPS44JL, TPS45JL, TPS46JL, TPS47JL, TPS48JL, TPS49JL, TPS4JL, TPS4-likeJL, TPS50JL, TPS51JL, TPS52JL, TPS53JL, TPS54JL, TPS55JL, TPS56JL, TPS57JL, TPS58JL, TPS59JL, TPS5JL, TPS5JL, TPS60JL, TPS61JL, TPS62JL, TPS63JL, TPS64JL, TPS6JL, TPS6-likeJL, TPS7JL, TPS8JL, TPS8JL, TPS8-likeJL, TPS9JL, TPS9JL, TPS9-likeJL and TPS9-like2JL.

[0152] FIG. 4 provides examples of terpene synthases, along with citations that describe the terpene synthases and corresponding Accession Numbers, for certain compositions and methods of analyses/applications/uses as provided herein. The full citations corresponding to each of the abbreviated citations in FIG. 4 are as follows:
[0153] (1) “Günnewich et al. 2007”: Günnewich et al., Nat. Prod. Comm., 2(3):1934578x0700200301 (2007)
[0154] (2) “Booth et al. 2017”: Booth et al., PLOS ONE, 12(3): e0173911 (2017)
[0155] (3) “Allen et al. 2019”: Allen et al., PLOS ONE, 14(9): e0222363 (2019)
[0156] (4) “Zager et al. 2019”: Zager et al., Plant Physiol., 180(4):1877-1897 (2019)
[0157] (5) “Livingston et al. 2019”: Livingston et al., The Plant Jour., 101(1):37-56 (2019)
[0158] (6) “Booth et al. 2020”: Booth et al., Plant Physiol., 184(1):130-147 (2020)

[0159] The contents of each of the above-cited documents are incorporated in their entirety by reference herein. Nucleic acid sequences encoding certain of the terpene synthases listed in FIG. 4 are provided in FIG. 5: these sequences are marked “Provided as Fasta File” in FIG. 4. FIG. 5 provides nucleic acid sequences (SEQ ID NOS:1339-1397) encoding examples of terpene synthases that can, in embodiments, be components of compositions and methods of analyses/applications/uses as provided herein.

[0160] It is understood that for any of the terpene synthases described herein for compositions and methods of analyses/applications/uses as provided herein, suitable conservative substitutions of amino acids are known to those of skill in this art and can generally be made without altering the biological activity of the resulting terpene synthases. Those of skill in the art recognize that, in general, single amino acid substitutions in non-essential regions of a polypeptide do not substantially alter biological activity (see, e.g., Watson et al. Molecular Biology of the Gene, 4th Edition, 1987, The Benjamin/Cummings Pub. co., p. 224). Such substitutions can be made, for example, in accordance with those set forth in TABLE 7 as follows:

TABLE 7

| Original residue | Conservative substitution |
|---|---|
| Ala (A) | Gly; Ser |
| Arg (R) | Lys |
| Asn (N) | Gln; His |
| Cys (C) | Ser |
| Gln (Q) | Asn |
| Glu (E) | Asp |
| Gly (G) | Ala; Pro |
| His (H) | Asn; Gln |
| Ile (I) | Leu; Val |
| Leu (L) | Ile; Val |
| Lys (K) | Arg; Gln; Glu |
| Met (M) | Leu; Tyr; Ile |
| Phe (F) | Met; Leu; Tyr |
| Ser (S) | Thr |
| Thr (T) | Ser |
| Trp (W) | Tyr |
| Tyr (Y) | Trp; Phe |
| Val (V) | Ile; Leu |

[0161] Other substitutions also are permissible, including more than one conservative substitution and, in some instances, such conservative substitutions in active sites of the enzyme, such as a terpene synthase. The substitutions can be determined empirically or in accord with known conservative substitutions.

### Methods of Analyzing the TPS Gene Profile of a Plant Cultivar

[0162] Provided herein are methods and compositions for analyzing the TPS gene profile of a plant cultivar. The analyzing can include, for example, identifying and/or quantitating one or more TPS genes and/or paralogs thereof in a plant cultivar. The methods employ polymerase chain reaction (PCR) primers that are complementary to unique subsequences within each TPS gene that is in the genome of the plant cultivar, wherein hybridization of a subsequence of a TPS gene or paralog thereof to the primers uniquely identifies and/or quantitates the TPS gene or a paralog thereof. A unique subsequence of a TPS gene is a portion of the TPS gene that is different from other subsequences of the TPS gene and is different from subsequences of other TPS genes, thereby permitting identification of each TPS gene in the genome of the plant cultivar, such as a Cannabis genome. The subsequences can be an intron or a portion thereof, an exon or a portion thereof, or any region in-between that is identified as unique compared to other subsequences in the TPS gene and compared to the subsequences in other TPS genes. In embodiments, the subsequences to which the primers can be hybridized are exons, or portions thereof. In certain embodiments, more than one unique subsequence (e.g., exon) of a TPS gene can be analyzed, e.g., 2, 3, 4, 5, 6, 7, 8, 9, 10 or more unique subsequences (e.g., exons) of a TPS gene can be identified and/or quantitated, thereby increasing the accuracy of identifying a particular TPS gene in the genomic profile of a plant cultivar.

[0163] The primers provided herein can be used to amplify TPS genes and/or paralogs thereof prior to input in various common assays for variant identification, including high resolution melting (HRM), quantitative PCR (qPCR), loop-mediated isothermal amplification (LAMP), restriction endonuclease digestion, gel electrophoresis, and/or Sanger/Next-Generation sequencing. For each plant cultivar that is analyzed according to the methods provided herein, a barcode representing each TPS gene and/or paralog thereof that is identified and/or quantitated can be assigned, thereby providing an efficient way to visualize the TPS gene profile of a plant cultivar. The barcode for a given TPS gene can be based, for example, on the number and types of exons that are detected and/or quantified for that TPS gene—each detected exon can be assigned a number, and the total read of all detected exons can constitute a barcode.

### Detection of TPS Genes or Paralogs Thereof

[0164] Provided herein are methods for analyzing nucleic acid from a plant sample. Also provided herein are methods for generating nucleic acid amplification products from a plant sample. Also provided herein are methods for preparing a nucleic acid mixture. A method herein can include contacting nucleic acid of a plant sample with a polynucleotide primer pair under amplification conditions. In embodiments, a method herein includes contacting nucleic acid of a plant sample with one or more polynucleotide primer pairs under amplification conditions. In some embodiments, a method herein comprises contacting nucleic acid of a plant sample with a plurality of polynucleotide primer pairs under amplification conditions. A plurality of primer pairs can include two or more polynucleotide primer pairs, three or more polynucleotide primer pairs, four or more polynucleotide primer pairs, five or more polynucleotide primer pairs, six or more polynucleotide primer pairs, seven or more polynucleotide primer pairs, eight or more polynucleotide primer pairs, nine or more polynucleotide primer pairs, or ten or more polynucleotide primer pairs. Each of the plurality of primer pairs can be used to analyze a sample in a separate reaction container, such as a well. Alternately, if the amplicons expected to be obtained using the plurality of primer pairs are expected to be of different sizes and/or are otherwise distinguishable (e.g., using labeled primers), a plurality of primers can be used to analyze the sample in a single reaction container.

[0165] In certain embodiments, a method includes generating one or more amplification products. Amplification products can be generated by any suitable amplification method described herein or known in the art (e.g., polymerase chain reaction (PCR)). Suitable amplification conditions can include any conditions that can generate an amplification product, when a target nucleic acid, such as a unique subsequence (e.g., exon) of a TPS gene, is contacted with primers that are capable of hybridizing to the target nucleic acid. In embodiments, a method includes generating a mixture (e.g., a mixture of two or more amplification product species). A mixture of two or more amplification product species can be generated when two or more primer pairs hybridize to different regions of a target nucleic acid. Such amplification product species can have different lengths and/or different nucleotide sequences, which can include overlapping and/or non-overlapping sequences.

[0166] Generally, a primer pair includes a forward primer and a reverse primer. Examples of primer pairs that can be used to detect exons in 74 Cannabis sativa TPS genes are set forth in Table 2 (SEQ ID NOS: 1-1284). Two primer pairs can include two different forward primer species (e.g., A-fwd and B-fwd) and two different reverse primer species (e.g., A-rev, B-rev); can include one forward primer species (e.g., A-fwd) and two different reverse primer species (e.g., A-rev, B-rev); or can include two different forward primer species (e.g., A-fwd and B-fwd) and one reverse primer species (e.g., A-rev), provided the combination of forward and reverse primer species is capable of generating two amplification product species. Further forward and reverse primer combinations are contemplated for additional primer pairs. Examples of forward and reverse primer pairing combinations, with the corresponding amplification product species, is provided in FIG. 1 herein. For example, the size of the product (amplicon) that is amplified by any of the pairs of primers provided herein, including primers prepared by any of the methods provided herein, can be, e.g., about 30, 40, 45, 50, 55, 60, 65, 70, 75, 80, 85, 90, 95, 100, 105, 110, 115, 120, 125, 130, 135, 140, 145, 150, 155, 160, 165, 170, 175, 180, 185, 190, 195, 200, 205, 210, 215, 220, 225, 230, 235, 240, 245, 250, 255, 260, 265, 270, 275, 280, 285, 290 or 295 base pairs, within +/− about 10% of each of the recited sizes of the amplicons. For example, the sizes of the primers used to generate the amplicons can be between about 10 bases to about 50 bases, generally between about 12, 13, 14 or 15 bases to about 20, 21, 22, 24, 25, 26, 27, 28, 29, 30, 31, 32, 33, 34 or 35 or more bases, for example between 15 to about 30 bases, such as 15, 16, 17, 18, 19, 20, 21, 22, 23, 24, 25, 26, 27, 28, 29 or 30 bases.

[0167] In certain embodiments, when a plurality of primer pairs is used, either in a single reaction container or in a separate reaction container for each primer pair, a majority of the polynucleotide primer pairs hybridize to subsequences of the TPS genes and/or paralogs thereof of the plant sample. A majority of the polynucleotide primer pairs can refer to greater than 50% of the primer pairs. For example, a majority of the polynucleotide primer pairs can refer to greater than 60% of the primer pairs, greater than 70% of the primer pairs, greater than 80% of the primer pairs, or greater than 90% of the primer pairs. In embodiments, all (e.g., 100%) of the polynucleotide primer pairs hybridize to subsequences of the TPS genes and/or paralogs thereof of a plant sample. In certain embodiments, the primer pairs are selected from among those set forth in Table 2, or from among those set forth in FIG. 1. Any of the forward primers set forth in Table 2 and FIG. 1 can be paired with any of the reverse primers set forth in Table 2 and FIG. 1, to form primer pairs for use in the methods herein.

[0168] In certain embodiments, one or more of the unique subsequences to which the polynucleotide primers hybridize can contain one or more variant nucleotide position, such as a substitution, an insertion or a deletion i.e., the methods of analysis provided herein can detect a genetic modification in a TPS gene.

[0169] A unique subsequence of a TPS gene or paralog thereof, to which the primer pairs hybridize, can be referred to as a target sequence. A target sequence generally refers to a unique subsequence, such as an exon, of a TPS gene or paralog thereof, between the two hybridization sites of a corresponding primer pair, and generally does not include the primer hybridization sites themselves. In embodiments, the two primer hybridization sites are conserved sequence regions that flank a diverse sequence, i.e., a unique subsequence of a TPS gene or paralog thereof is diverse and can differ from other subsequences of the TPS gene and of other TPS genes by 1, 2, 3, 4, 5, 6, 7, 8, 9, 10, 11, 12, 13, 14, 15, 16, 17, 18, 19, 20, 21, 22, 23, 24, 25, 26, 27, 28, 29, 30, 31, 32, 33, 34, 35, 36, 37, 38, 39, 40, 41, 42, 43, 44, 45, 46, 47, 48, 49, 50, 51, 52, 53, 54, 55, 56, 57, 58, 59, 60, 61, 62, 63, 64, 65, 66, 67, 68, 69, 70, 71, 72, 73, 74, 75, 76, 77, 78, 79, 80, 81, 82, 83, 84, 85, 86, 87, 88, 89, 90, 91, 92, 93, 94, 95, 96, 97, 98, 99 or 100 or more bases, such as 110, 120, 130, 140 or 150 or more bases. In embodiments, the variant positions described for a target sequence do not include positions in the primer hybridization sites. In certain embodiments, the TPS genes and/or paralogs thereof have an overall sequence identity of percentages from between about 40% to about 90, 91, 92, 93, 94, 95, 96, 97, 98, 99 or 100%, such as at least 41, 42, 43, 44, 45, 46, 47, 48, 49, 50, 51, 52, 53, 54, 55, 56, 57, 58, 59, 60, 61, 62, 63, 64, 65, 66, 67, 68, 69, 70, 71, 72, 73, 74, 75, 76, 77, 78, 79, 80, 81, 82, 83, 84, 85, 86, 87, 88, 89, 90, 91, 92, 93, 94, 95, 96, 97, 98, 99 or 100%.

[0170] In embodiments, one or more plant cultivars are of the family Rosidae. In certain embodiments, the plant sample is from a Cannabis cultivar, and the TPS gene profile is of a Cannabis genome. In aspects, the Cannabis cultivar is selected from among one or more of Type 1, Type 2, Type 3, Type 4 and Type 5 cultivars. Examples of Cannabis genomes include, but are not limited to, a Cannabis sativa genome, Cannabis indica genome, or Cannabis ruderalis genome. Examples of Cannabis genomes include CS10 (GENBANK assembly accession: GCA_900626175.1; REFSEQ assembly accession: GCF_900626175.1), Arcata Trainwreck, Grape Stomper, Citrix, Black 84, Headcheese, Red Eye OG, Tahoe OG, Master Kush, Chem 91, Domnesia, Sour Tsunami, Sour Tsunami_x_CK, Tibor_1_2016, 80 E-1, 80 E-2, 80 E-3, Harlox, Saint Jack, Herijuana, Mothers Milk_5, Black Beauty, Sour Diesel, JL_1, JL_2, JL_3, JL_4, JL_5, JL_6, JL_father, BBCC_x_JL_father, JL_mother, JL_mother_p, IdaliaFT_1, Fedora17_6_1, Carmal_1_2016, CS_1_2016, ElCam_1_2016, C3/USO-1, Carmagnola_3, and Merino_S_1.

[0171] A subsequence (e.g., exon) that is non-identical to any subsequence, or complement thereof, in the TPS gene or paralog thereof of a Cannabis genome generally refers to a sequence containing one or more variant nucleotides when compared to any other subsequence, or complement thereof, in the same TPS gene or in other TPS genes of the Cannabis genome. The primers provided herein generally share a high degree of sequence identity to the regions of the subsequence to which they hybridize. In some embodiments, each polynucleotide in each primer pair contains a sequence that is at least about 95% identical to a subsequence, or complement thereof, of a TPS gene in the genome of the plant cultivar. In certain embodiments, each polynucleotide in each primer pair contains a sequence that is 100% identical to a subsequence, or complement thereof, of a TPS gene in the genome of the plant cultivar.

[0172] In some embodiments, a primer provided herein includes a polynucleotide where one or more nucleotide positions contain a nonstandard nucleotide and/or a degenerate nucleotide. A nonstandard nucleotide can be, for example, a non-natural base, a modified base, or a universal base. A universal base is a base capable of indiscriminately base pairing with each of the four standard nucleotide bases: A, C, G and T. Universal bases that may be incorporated into a primer herein include, but are not limited to, inosine, deoxyinosine, 2′-deoxyinosine (dl, dlnosine), nitroindole, 5-nitroindole, and 3-nitropyrrole (e.g., 5′ nitroindole, deoxyinosine, deoxynebularine). A degenerate nucleotide typically refers to a mixture of nucleotides at a given position and may be represented by a letter other than A, T, G or C. For example, a degenerate nucleotide may be represented by R (A or G), Y (C or T), S (G or C), W (A or T), K (G or T), M (A or C), B (C or G or T), D (A or G or T), H (A or C or T), V (A or C or G), or N (any base), for example. Such symbols for degenerate nucleotides are part of the International Union of Pure and Applied Chemistry (IUPAC) standard nomenclature for nucleotide base sequence names and represent degenerate or nonstandard nucleotides that can bind multiple nucleotides. For example, an “M” in a primer or probe would include a mixture of A and C at that position, and thus could bind to either T or G in a complementary DNA strand. An “N” in a primer or probe would include a mixture of A, T, G and C at that position, and thus could bind to any nucleotide at that position in the complementary DNA strand.

### Methods for Analyzing Nucleic Acids

[0173] Provided herein are methods for analyzing nucleic acids. In embodiments, methods herein include analyzing nucleic acid from a plant sample. In certain embodiments, methods provided herein include analyzing nucleic acid from a Cannabis plant sample. In certain embodiments, the methods provided herein include analyzing subsequences of TPS genes and/or paralogs thereof.

[0174] In embodiments, analyzing includes detecting the presence or absence of a TPS gene or a paralog thereof in the genome of a plant cultivar. In certain embodiments, analyzing includes determining the presence or absence of more than one TPS gene or a paralog thereof in the genome of a plant cultivar. In embodiments, analyzing includes determining all the TPS genes and/or paralogs thereof that are present in the genome of a plant cultivar. In certain embodiments (e.g., by analyzing cDNA from the plant sample to detect the presence or absence of TPS genes and/or paralogs thereof), the expression profile of TPS genes and/or paralogs thereof in a plant sample can be analyzed. In embodiments, analyzing includes determining the presence or absence of one or more TPS genes and/or paralogs thereof in genomic DNA from the plant cultivar sample. In embodiments, the plant sample is from a Cannabis plant cultivar. In certain embodiments, the presence or absence of a TPS gene or paralog thereof can be determined based on one or more amplification products generated using one or more primer pairs that specifically amplify unique subsequences of one or more TPS genes or paralogs thereof. In certain embodiments, the presence or absence of a TPS gene or paralog thereof can be determined based on two or more amplification products generated using one or more primer pairs that specifically amplify unique subsequences of one or more TPS genes or paralogs thereof. In embodiments, the presence or absence of a TPS gene or paralog thereof can be determined based on 3, 4, 5, 6, 7, 8, 9, 10, 20, 30, 35, 40, 45, 50, 55, 60, 70, 80, 90, 100, 150, 200, 250, 300, 350, 400, 450, 500, 550, 600 or 650 or more amplification products generated using one or more primer pairs that specifically amplify unique subsequences of one or more TPS genes or paralogs thereof. In certain embodiments, the number of TPS genes and/or paralogs thereof that are detected in the nucleic acid from the plant sample can be 1, 2, 3, 4, 5, 6, 7, 8, 9, 10, 11, 12, 13, 14, 15, 16, 17, 18, 19, 20, 21, 22, 23, 24, 25, 26, 27, 28, 29, 30, 31, 32, 33, 34, 35, 36, 37, 38, 39, 40, 41, 42, 43, 44, 45, 46, 47, 48, 49, 50, 51, 52, 53, 54, 55, 56, 57, 58, 59, 60, 61, 62, 63, 64, 65, 66, 67, 68, 69, 70, 71, 72, 73, 74, 75, 76, 77, 78, 79 or 80 or more genes and/or paralogs. In certain embodiments, the plant cultivar is a Cannabis cultivar.

[0175] In certain embodiments, analyzing includes detecting a variant of a TPS gene or a paralog thereof in the genome of a plant cultivar, when compared to a reference unmodified genome of the plant cultivar. In embodiments, one or more TPS genes and/or paralogs thereof in the TPS gene profile is modified by genetic modification methods to obtain desired terpene, cannabinoid and/or flavonoid production profiles, and the analyzing includes screening to identify whether the genetic modification is in fact present, when compared to a reference unmodified genome of the plant cultivar. For example, based on the analysis of a reference unmodified TPS gene profile, and the terpene (and/or flavonoid and/or cannabinoid) abundance profile that is expected or is obtained for the unmodified TPS gene profile, it may be desirable to genetically modify one or TPS genes and/or paralogs thereof to provide an improved terpene (and/or flavonoid and/or cannabinoid) abundance profile, e.g., to impart improved medicinal properties, or improved resistance to an organism or environment, or improved affinity for an organism or environment. The variant can include, e.g., one or more nucleotide substitutions, insertions, or deletions at one or more variant positions, thereby changing the terpene and/or cannabinoid and/or flavonoid profiles. Methods of genetically modifying nucleic acids are known to those of skill in the art and include, but are not limited to, ZFN (Zinc Finger Nuclease), TALEN (Transcription Activator-Like Effector Nucleases), CRISPR-cas (cas9, cas12, cas13), Cre-Lox, MiRNA, SIRNA, ShRNA or a combination thereof. In certain embodiments, analyzing includes determining a terpene abundance profile, a flavonoid abundance profile, or any combination thereof. Techniques for measuring terpenes include, but are not limited to, gas chromatography with a flame ionization detector (GC-FID), gas chromatography—mass spectrometry (GC-MS) and headspace solid-phase microextraction (HS-SPME) in conjunction with GC-MS. Techniques for measuring flavonoids include, but are not limited to, gas chromatography (GC), gas chromatography—mass spectrometry (GC-MS), HPLC, HPLC-UV and NIR (near infrared reflectance). Techniques for measuring cannabinoids include, but are not limited to, HPLC, ultra-HPLC, HPLC-UV, HPLC-MS, UHPLC-MS, time-of-flight mass spectrometry (TOF-MS), LC-TOF-MS and NIR (near infrared reflectance).

[0176] In embodiments, detecting one or more genetic variations in a TPS gene or paralog thereof includes contacting the nucleic acid of the plant sample with one or more primer pairs as provided herein, under conditions wherein the one or more primer pairs hybridize to the one or more unique subsequences of a TPS gene or paralog thereof, wherein the one or more unique subsequences contain one or more variant nucleotide positions relative to the corresponding wild-type or unmodified subsequence in the plant cultivar. Following hybridization, the amplification conditions can be the same amplification conditions as those used to amplify the corresponding wild-type or unmodified subsequence, or they can be a different set of amplification conditions. In embodiments, a set of primers can be designed to hybridize with greater specificity for the expected genetically modified variant sequence.

[0177] Any suitable method for genotype assessment may be used for detecting a genetic variation in a TPS gene and/or paralog thereof, such as, for example, nucleic acid sequencing (examples of which are described herein) and/or a high-resolution melting (HRM) assay provided herein. Generally, a sequencing process and/or an HRM assay are performed in conjunction with a nucleic acid amplification method described herein (e.g., using the amplification primers provided herein). In certain embodiments, one or more genetic variations can be determined based on the presence and/or absence of amplification products generated using certain amplification primers provided herein.

### Samples

[0178] Provided herein are methods and compositions for processing, preparing, and/or analyzing nucleic acid. Nucleic acid or a nucleic acid mixture used in the methods and compositions described herein can be isolated from a sample (e.g., a test sample) obtained from a plant cultivar. A plant cultivar can be any plant whose genome includes TPS synthase genes and/or that produces terpenes, including for example, angiosperms, any species of woody, ornamental or decorative, crop or cereal, fruit or vegetable, fruit plant or vegetable plant, flower or tree, macroalga or microalga, phytoplankton and photosynthetic algae (e.g., green algae Chlamydomonas reinhardtii). A plant also refers to a unicellular plant (e.g. microalga) and a plurality of plant cells that are largely differentiated into a colony (e.g. volvox) or a structure that is present at any stage of a plant's development. Such structures include, but are not limited to, a fruit, a flower, a seed, a shoot, a stem, a leaf, a root, plant tissue sand the like. As used herein, the term “plant tissue” includes differentiated and undifferentiated tissues of plants including those present in roots, shoots, leaves, pollen, seeds and tumors, as well as cells in culture (e.g., single cells, protoplasts, embryos, callus, etc.). Plant tissue can be in planta, in organ culture, tissue culture, or cell culture. Any of the foregoing plant cultivars, portions thereof or extracts thereof are contemplated for use in the methods provided herein.

[0179] A nucleic acid sample can be isolated, obtained or prepared from any type of suitable biological (e.g., plant) specimen or sample (e.g., a test sample). A nucleic acid sample can be isolated or obtained from a single plant cell, a plurality of plant cells (e.g., cultured plant cells), plant cell culture media, conditioned plant cell culture media, or plant tissue (e.g., leaves, roots, stems).

[0180] A sample can be heterogeneous. For example, a sample can include more than one cell type and/or one or more nucleic acid species. In embodiments, a sample can include plant nucleic acid from more than one plant cultivar. In embodiments, the more than one plant cultivar providing the nucleic acid belong to the same species, e.g., both can be Cannabis cultivars. In embodiments, a sample can include plant cells and/or nucleic acid from a single plant or can include plant cells and/or nucleic acid from multiple plants.

### Nucleic Acid

[0181] Provided herein are methods and compositions for processing, preparing, and/or analyzing nucleic acid. The terms nucleic acid(s), nucleic acid molecule(s), nucleic acid fragment(s), target nucleic acid(s), nucleic acid template(s), template nucleic acid(s), nucleic acid target(s), target nucleic acid(s), polynucleotide(s), polynucleotide fragment(s), target polynucleotide(s), polynucleotide target(s), and the like may be used interchangeably throughout the disclosure. The terms refer to nucleic acids of any composition from, such as DNA (e.g., complementary DNA (cDNA; synthesized from any RNA or DNA of interest), genomic DNA (gDNA), genomic DNA fragments, mitochondrial DNA (mtDNA), recombinant DNA (e.g., plasmid DNA), and the like), RNA (e.g., message RNA (mRNA), short inhibitory RNA (siRNA), ribosomal RNA (rRNA), transfer RNA (tRNA), microRNA, transacting small interfering RNA (ta-siRNA), natural small interfering RNA (nat-siRNA), small nucleolar RNA (snoRNA), small nuclear RNA (snRNA), long non-coding RNA (lncRNA), non-coding RNA (ncRNA), transfer-messenger RNA (tmRNA), precursor messenger RNA (pre-mRNA), small Cajal body-specific RNA (scaRNA), piwi-interacting RNA (piRNA), endoribonuclease-prepared siRNA (esiRNA), small temporal RNA (stRNA), signal recognition RNA, telomere RNA, and the like), and/or DNA or RNA analogs (e.g., containing base analogs, sugar analogs and/or a non-native backbone and the like), RNA/DNA hybrids and polyamide nucleic acids (PNAs), all of which can be in single- or double-stranded form, and unless otherwise limited, can encompass known analogs of natural nucleotides that can function in a similar manner as naturally occurring nucleotides. The plant nucleic acid analyzed according to the methods provided herein can be from, a plant, a plasmid containing plant nucleic acid, autonomously replicating sequence (ARS), mitochondria, centromere, artificial chromosome, chromosome, or other nucleic acid able to replicate or be replicated in vitro or in a host cell, a cell, a cell nucleus or cytoplasm of a cell in certain embodiments. A template nucleic acid in some embodiments can be from a single chromosome (e.g., a nucleic acid sample may be from one chromosome of a sample obtained from a diploid organism). Unless specifically limited, the term “nucleic acid” includes nucleic acids containing known analogs of natural nucleotides that have similar binding properties as the reference nucleic acid and are metabolized in a manner similar to naturally occurring nucleotides. Unless otherwise indicated, a particular nucleic acid sequence also implicitly encompasses conservatively modified variants thereof (e.g., degenerate codon substitutions), alleles, orthologs, single nucleotide polymorphisms (SNPs), and complementary sequences as well as the sequence explicitly indicated. Specifically, degenerate codon substitutions can be achieved by generating sequences in which the third position of one or more selected (or all) codons is substituted with mixed-base and/or deoxyinosine residues. The term nucleic acid can be used interchangeably herein with locus, gene, cDNA, and mRNA encoded by a gene. The term also can include, as equivalents, derivatives, variants and analogs of RNA or DNA synthesized from nucleotide analogs, single-stranded (“sense” or “antisense,” “plus” strand or “minus” strand, “forward” reading frame or “reverse” reading frame) and double-stranded polynucleotides. The term “gene” also can refer to a section of DNA involved in producing a polypeptide chain, such as an exon or portion thereof; and generally includes regions preceding and following the coding region (leader and trailer) involved in the transcription/translation of the gene product and the regulation of the transcription/translation, as well as intervening sequences (introns) between individual coding regions (exons). A nucleotide or base generally refers to the purine and pyrimidine molecular units of nucleic acid (e.g., adenine (A), thymine (T), guanine (G), and cytosine (C)). For RNA, the base thymine is replaced with uracil. Nucleic acid length or size can be expressed as a number of bases.

[0182] Target nucleic acids, such as a TPS gene or a paralog thereof or a portion thereof containing a unique subsequence, can be any nucleic acids of interest. Nucleic acids can be polymers of any length composed of deoxyribonucleotides (i.e., DNA bases), ribonucleotides (i.e., RNA bases), or combinations thereof, e.g., 10 bases or longer, 20 bases or longer, 50 bases or longer, 100 bases or longer, 200 bases or longer, 300 bases or longer, 400 bases or longer, 500 bases or longer, 1000 bases or longer, 2000 bases or longer, 3000 bases or longer, 4000 bases or longer, 5000 bases or longer. In certain aspects, nucleic acids are polymers composed of deoxyribonucleotides (i.e., DNA bases), ribonucleotides (i.e., RNA bases), or combinations thereof, e.g., 10 bases or less, 20 bases or less, 50 bases or less, 100 bases or less, 200 bases or less, 300 bases or less, 400 bases or less, 500 bases or less, 1000 bases or less, 2000 bases or less, 3000 bases or less, 4000 bases or less, or 5000 bases or less.

[0183] Nucleic acid can be single or double stranded. Single stranded DNA (ssDNA), for example, can be generated by denaturing double stranded DNA by heating or by treatment with alkali, for example. Accordingly, in some embodiments, ssDNA is derived from double-stranded DNA (dsDNA).

[0184] Nucleic acid (e.g., nucleic acid targets, polynucleotides, primers, polynucleotide primers, polynucleotide primer pairs, sequences, and subsequences) as described herein can be complementary to another nucleic acid, hybridize to another nucleic acid, and/or be capable of hybridizing to another nucleic acid. The terms “complementary” or “complementarity” or “hybridization” generally refer to a nucleotide sequence that base-pairs by non-covalent bonds to a region of a nucleic acid (e.g., a primer that hybridizes to a unique subsequence of a TPS gene or a paralog thereof). In the canonical Watson-Crick base pairing, adenine (A) forms a base pair with thymine (T), and guanine (G) pairs with cytosine (C) in DNA. In RNA, thymine (T) is replaced by uracil (U). Thus, A is complementary to T and G is complementary to C. In RNA, A is complementary to U and vice versa. In a DNA-RNA duplex, A (in a DNA strand) is complementary to U (in an RNA strand). Typically, “complementary” or “complementarity” or “hybridize” or “capable of hybridizing” refers to a nucleotide sequence that is at least partially complementary. These terms can also encompass duplexes that are fully complementary such that every nucleotide in one strand is complementary or hybridizes to every nucleotide in the other strand in corresponding positions.

[0185] In certain instances, a nucleotide sequence can be partially complementary to a target, wherein not all nucleotides of, e.g., a primer, are complementary to every nucleotide in the target nucleic acid (unique subsequence, e.g., exon of a TPS synthase gene or paralog thereof) in all the corresponding positions. For example, the primer can be perfectly (i.e., 100%) complementary to a unique subsequence of a TPS synthase gene or paralog thereof, or a primer can share some degree of complementarity to a unique subsequence of a TPS synthase gene or paralog thereof, e.g., 70%, 75%, 85%, 90%, 95%, 99%.

[0186] The percent identity of two nucleotide sequences can be determined by aligning the sequences for optimal comparison purposes (e.g., gaps can be introduced in the sequence of a first sequence for optimal alignment) The nucleotides at corresponding positions are then compared, and the percent identity between the two sequences can be determined as a function of the number of identical positions shared by the sequences (i.e., % identity=# of identical positions/total # of positions×100). When a position in one sequence is occupied by the same nucleotide as the corresponding position in the other sequence, then the molecules are identical at that position.

[0187] In certain embodiments, nucleic acids in a mixture of nucleic acids are analyzed. A mixture of nucleic acids can include two or more nucleic acid species having the same or different nucleotide sequences, different lengths, different origins (e.g., genomic origins, cDNA, cell or tissue origins, sample origins, subject origins, and the like), different amplification products (e.g., amplification products generated from different sets of primer pairs), or combinations thereof. In certain embodiments, a mixture of nucleic acids includes or can generate a plurality of amplification product species generated from different sets of primer pairs (e.g., 2 or more, 3 or more, 4 or more, 5 or more, 6 or more, 7 or more, 8 or more, 9 or more, 10 or more, 11 or more, 12 or more, 13 or more, 14 or more, 15 or more, 16 or more, 17 or more, 18 or more, 19 or more, 20 or more, 25 or more, 30 or more, 35 or more, 40 or more, 45 or more, 50 or more, 55 or more, 60 or more, 65 or more, 70 or more, 75 or more, 80 or more, 85 or more, 90 or more, 95 or more, 100 or more, 150 or more, 200 or more, 250 or more, 300 or more, 350 or more, 400 or more, 450 or more, 500 or more, 550 or more, 600 or more, or 650 or more amplification product species). In embodiments, a mixture of nucleic acids includes single-stranded nucleic acid and double-stranded nucleic acid. In certain embodiments, a mixture of nucleic acids includes DNA and RNA. In certain embodiments, a mixture of nucleic acids includes ribosomal RNA (rRNA) and messenger RNA (mRNA).

[0188] Nucleic acids used in the methods provided herein can contain nucleic acid from one plant sample or from two or more plant samples (e.g., from 1 or more, 2 or more, 3 or more, 4 or more, 5 or more, 6 or more, 7 or more, 8 or more, 9 or more, 10 or more, 11 or more, 12 or more, 13 or more, 14 or more, 15 or more, 16 or more, 17 or more, 18 or more, 19 or more, or 20 or more plant samples).

[0189] Nucleic acid can be derived from one or more plant sources by methods known in the art. Any suitable method can be used for isolating, extracting and/or purifying DNA from a plant sample, non-limiting examples of which include methods of DNA preparation (e.g., described by Sambrook and Russell, Molecular Cloning: A Laboratory Manual 3d ed., 2001), various commercially available reagents or kits, such as DNeasy®, RNeasy®, QIAprep®, QIAquick®, and QIAamp®, nucleic acid isolation/purification kits by Qiagen, Inc. (Germantown, Md); DNAzol®, ChargeSwitch® Purelink®, GeneCatcher® nucleic acid isolation/purification kits by Life Technologies, Inc. (Carlsbad, CA); NucleoMag®, NucleoSpin®, and NucleoBond® nucleic acid isolation/purification kits by Clontech Laboratories, Inc. (Mountain View, CA), DNA/RNA extraction kits from Zymo Research (e.g., ZYMOBIOMICS DNA Mini Kit, ZYMOBIOMICS DNA/RNA Miniprep Kit, ZYMOCLEAN gel DNA recovery); the like or combinations thereof.

[0190] Nucleic acid can be provided for performing methods described herein with or without processing of the sample(s) containing the nucleic acid. In embodiments, nucleic acid is provided for performing methods provided herein after processing of the sample(s) containing the nucleic acid. For example, a nucleic acid can be extracted, isolated, purified, partially purified and/or amplified from the sample(s). The term “isolated” as used herein refers to nucleic acid removed from its original environment (e.g., the natural environment if it is naturally occurring, or a host cell if expressed exogenously), and thus is altered by human intervention (e.g., “by the hand of man”) from its original environment. The term “isolated nucleic acid” as used herein can refer to a nucleic acid removed from a test subject (e.g., a plant). An isolated nucleic acid can be provided with fewer non-nucleic acid components (e.g., protein, lipid) than the number of components present in a source sample. A composition containing isolated nucleic acid can be about 50% to greater than 99% free of non-nucleic acid components. A composition containing isolated nucleic acid can be about 90%, 91%, 92%, 93%, 94%, 95%, 96%, 97%, 98%, 99% or greater than 99% free of non-nucleic acid components. The term “purified” as used herein can refer to a nucleic acid provided that contains fewer non-nucleic acid components (e.g., protein, lipid, carbohydrate) than the number of non-nucleic acid components present prior to subjecting the nucleic acid to a purification and/or analysis procedure. A composition containing purified nucleic acid may be about 80%, 81%, 82%, 83%, 84%, 85%, 86%, 87%, 88%, 89%, 90%, 91%, 92%, 93%, 94%, 95%, 96%, 97%, 98%, 99% or greater than 99% free of other non-nucleic acid components. The term “purified” as used herein can refer to a nucleic acid provided that contains fewer nucleic acid species than in the sample source from which the nucleic acid is derived. A composition containing purified nucleic acid may be about 90%, 91%, 92%, 93%, 94%, 95%, 96%, 97%, 98%, 99% or greater than 99% free of nucleic acid species other than the plant nucleic acid of interest.

[0191] In certain embodiments, nucleic acid for performing methods provided herein is used without prior processing of the sample(s) containing the nucleic acid. For example, nucleic acid can be analyzed directly from a plant sample without prior extraction, purification, partial purification, and/or amplification.

[0192] Nucleic acid also can be exposed to a process that modifies certain nucleotides in the nucleic acid before being analyzed or prepared according to the methods provided herein. A process that selectively modifies nucleic acid based upon the methylation state of nucleotides therein can be applied to nucleic acid, for example. In addition, conditions such as high temperature, ultraviolet radiation, x-radiation, can induce changes in the sequence of a nucleic acid molecule. Nucleic acid can be provided in any form that is suitable for conducting an analysis (e.g., genotype analysis, sequence analysis).

### Primers

[0193] Primers useful for detection, amplification, quantification, sequencing and/or analysis of nucleic acid are provided. The term “primer” as used herein refers to a nucleic acid that includes a nucleotide sequence capable of hybridizing or annealing to a target nucleic acid, at or near (e.g., adjacent to) a specific region of interest. Primers can allow for specific determination of a target nucleic acid nucleotide sequence or detection of the target nucleic acid (e.g., presence or absence of a sequence), or feature thereof, for example. A primer typically is a synthetic sequence. The term “specific” or “specificity,” as used herein, refers to the binding or hybridization of one molecule to another molecule, such as a primer for a target polynucleotide. That is, “specific” or “specificity” refers to the recognition, contact, and formation of a stable complex between two molecules, as compared to substantially less recognition, contact, or complex formation of either of those two molecules with other molecules. As used herein, the terms “anneal” and “hybridize” refer to the formation of a stable complex between two molecules. The terms “primer,” “polynucleotide,” “oligo,” or “oligonucleotide” are used interchangeably herein, when referring to primers.

[0194] A primer nucleic acid can be designed and synthesized using methods known to those of skill in the art as well as those provided herein. The primers used in the methods provided herein can be of any length suitable for hybridizing to a nucleotide sequence of interest (e.g., where the nucleic acid is in liquid phase or is bound to a solid support) and performing methods of analyses described herein. Primers can be designed based on any target nucleotide sequence, such as a unique subsequence of a TPA gene or a paralog thereof. A primer, in embodiments, can be about 10 to about 100 nucleotides, about 10 to about 70 nucleotides, about 10 to about 50 nucleotides, about 15 to about 30 nucleotides, or about 5, 6, 7, 8, 9, 10, 11, 12, 13, 14, 15, 16, 17, 18, 19, 20, 25, 30, 35, 40, 45, 50, 55, 60, 65, 70, 75, 80, 85, 90, 95 or 100 nucleotides in length. A primer can include naturally occurring and/or non-naturally occurring nucleotides (e.g., labeled nucleotides), or a mixture thereof. Primers suitable for use in the methods provided herein can be synthesized and labeled using known techniques. For example, primers can be chemically synthesized according to the solid phase phosphoramidite triester method first described by Beaucage and Caruthers, Tetrahedron Lett., 22:1859-1862, 1981, using an automated synthesizer, as described in Needham-VanDevanter et al., Nucleic Acids Res. 12:6159-6168, 1984. Purification of primers can be achieved by native acrylamide gel electrophoresis or by anion-exchange high-performance liquid chromatography (HPLC), for example, as described in Pearson and Regnier, J. Chrom., 255:137-149, 1983.

[0195] All or a portion of a primer sequence can be complementary or substantially complementary to a target nucleic acid. As referred to herein, “substantially complementary” with respect to sequences refers to nucleotide sequences that will hybridize with each other. The stringency of the hybridization conditions can be altered to tolerate varying amounts of sequence mismatch. Included are target and primer sequences that are 55% or more, 56% or more, 57% or more, 58% or more, 59% or more, 60% or more, 61% or more, 62% or more, 63% or more, 64% or more, 65% or more, 66% or more, 67% or more, 68% or more, 69% or more, 70% or more, 71% or more, 72% or more, 73% or more, 74% or more, 75% or more, 76% or more, 77% or more, 78% or more, 79% or more, 80% or more, 81% or more, 82% or more, 83% or more, 84% or more, 85% or more, 86% or more, 87% or more, 88% or more, 89% or more, 90% or more, 91% or more, 92% or more, 93% or more, 94% or more, 95% or more, 96% or more, 97% or more, 98% or more or 99% or more complementary to each other.

[0196] Primers that are substantially complimentary to a target nucleic acid sequence are also substantially identical to the compliment of the target nucleic acid sequence. That is, primers are substantially identical to the anti-sense strand of the nucleic acid. As referred to herein, “substantially identical” with respect to sequences refers to nucleotide sequences that are 55% or more, 56% or more, 57% or more, 58% or more, 59% or more, 60% or more, 61% or more, 62% or more, 63% or more, 64% or more, 65% or more, 66% or more, 67% or more, 68% or more, 69% or more, 70% or more, 71% or more, 72% or more, 73% or more, 74% or more, 75% or more, 76% or more, 77% or more, 78% or more, 79% or more, 80% or more, 81% or more, 82% or more, 83% or more, 84% or more, 85% or more, 86% or more, 87% or more, 88% or more, 89% or more, 90% or more, 91% or more, 92% or more, 93% or more, 94% or more, 95% or more, 96% or more, 97% or more, 98% or more or 99% or more identical to each other. One test for determining whether two nucleotide sequences are substantially identical is to determine the percent of identical nucleotide sequences shared.

[0197] Primer sequences and length can affect hybridization to target nucleic acid sequences. Depending on the degree of mismatch between the primer and target nucleic acid, low, medium or high stringency conditions may be used to effect primer/target annealing. s used herein, the term “stringent conditions” refers to conditions for hybridization and washing. Methods for hybridization reaction temperature condition optimization are known, and can be found, e.g., in Current Protocols in Molecular Biology, John Wiley & Sons, N.Y., 6.3.1-6.3.6 (1989). Aqueous and non-aqueous methods are described in the aforementioned reference and either can be used. Non-limiting examples of stringent hybridization conditions include, for example, hybridization in 6× sodium chloride/sodium citrate (SSC) at about 45° C., followed by one or more washes in 0.2×SSC, 0.1% SDS at 50° C. Another example of stringent hybridization conditions includes hybridization in 6× sodium chloride/sodium citrate (SSC) at about 45° C., followed by one or more washes in 0.2× SSC, 0.1% SDS at 55° C. A further example of stringent hybridization conditions includes hybridization in 6× sodium chloride/sodium citrate (SSC) at about 45° C., followed by one or more washes in 0.2×SSC, 0.1% SDS at 60° C. Often, stringent hybridization conditions are hybridization in 6× sodium chloride/sodium citrate (SSC) at about 45° C., followed by one or more washes in 0.2×SSC, 0.1% SDS at 65° C. More often, stringency conditions can include 0.5 M sodium phosphate, 7% SDS at 65° C., followed by one or more washes at 0.2×SSC, 1% SDS at 65° C. Stringent hybridization temperatures also can be altered (generally, lowered) with the addition of certain organic solvents, such as formamide for example. Organic solvents such as formamide can reduce the thermal stability of double-stranded polynucleotides, so that hybridization can be performed at lower temperatures, while still maintaining stringent conditions and extending the useful life of heat labile nucleic acids. Features of primers described herein also can apply to probes such as, for example, the qPCR probes provided herein.

[0198] As used herein, the phrase “hybridizing” or grammatical variations thereof, refers to binding of a first nucleic acid molecule to a second nucleic acid molecule under low, medium or high stringency conditions, or under nucleic acid synthesis conditions. Hybridizing can include instances where a first nucleic acid molecule binds to a second nucleic acid molecule, where the first and second nucleic acid molecules are complementary. As used herein, “specifically hybridizes” refers to preferential hybridization under nucleic acid synthesis conditions of a primer, to a nucleic acid molecule having a sequence complementary to the primer compared to hybridization to a nucleic acid molecule not having a complementary sequence. For example, specific hybridization includes the hybridization of a primer to a target nucleic acid sequence that is complementary to the primer.

[0199] In certain embodiments, primers can include a nucleotide subsequence that is complementary to a solid phase nucleic acid primer hybridization sequence or substantially complementary to a solid phase nucleic acid primer hybridization sequence (e.g., about 75%, 76%, 77%, 78%, 79%, 80%, 81%, 82%, 83%, 84%, 85%, 86%, 87%, 88%, 89%, 90%, 91%, 92%, 93%, 94%, 95%, 96%, 97%, 98%, 99% or greater than 99% identical to the primer hybridization sequence complement when aligned). A primer can contain a nucleotide subsequence not complementary to or not substantially complementary to a solid phase nucleic acid primer hybridization sequence (e.g., a sequence at the 3′ or 5′ end of the nucleotide subsequence in the primer complementary to or substantially complementary to the solid phase primer hybridization sequence, which sequence can hybridize to a unique subsequence in a TPS gene or paralog thereof).

[0200] A primer, in certain embodiments, can contain a modification such as one or more nonstandard nucleotides, non-natural nucleotides, universal bases, degenerate nucleotides, inosines, abasic sites, locked nucleic acids, minor groove binders, duplex stabilizers (e.g., acridine, spermidine), Tm modifiers or any modifier that changes the binding properties of the primers or probes. A primer, in certain embodiments, can contain a detectable molecule or entity (e.g., a fluorophore, radioisotope, colorimetric agent, particle, enzyme, and the like).

[0201] A primer also can refer to a polynucleotide sequence that, when hybridized to a subsequence of a target nucleic acid or another primer, facilitates the detection of a primer, a target nucleic acid or both, as with molecular beacons, for example. The term “molecular beacon,” as used herein, refers to detectable molecule, where the detectable property of the molecule is detectable only under certain specific conditions, thereby enabling it to function as a specific and informative signal. Non-limiting examples of detectable properties are, optical properties, electrical properties, magnetic properties, chemical properties and time or speed through an opening of known size.

### Amplification

[0202] Nucleic acids can be amplified under amplification conditions. The terms “amplify,” “amplification,” “amplification reaction,” “amplifying,” “amplified,” or “amplification conditions” as used herein refer to subjecting a target nucleic acid in a plant sample (e.g., TPS genes or paralogs thereof in a plant cultivar genome, or plant cDNA) to a process that linearly or exponentially generates amplicon nucleic acids having the same or substantially the same nucleotide sequence as the target nucleic acid or a portion thereof. In certain embodiments, the term “amplified” or “amplification” or “amplification conditions” refers to a method that includes a polymerase chain reaction (PCR).

[0203] Nucleic acid can be amplified using a suitable amplification process. Nucleic acid amplification typically involves enzymatic synthesis of nucleic acid amplicons (copies), which contain a sequence complementary to a nucleotide sequence being amplified.

[0204] In certain embodiments, a limited amplification reaction, also known as pre-amplification, can be performed (e.g., of gDNA). Pre-amplification is a method in which a limited amount of amplification occurs due to a small number of cycles, for example 10 cycles, being performed. Pre-amplification can allow some amplification, but stops amplification prior to the exponential phase, and typically produces about 500 copies of the desired nucleotide sequence(s). Use of pre-amplification can limit inaccuracies associated with depleted reactants in standard PCR reactions, for example, and also can reduce amplification biases due to nucleotide sequence or species abundance of the target. In embodiments, a one-time primer extension can be performed as a prelude to linear or exponential amplification.

[0205] Any suitable amplification technique can be utilized. Amplification methods include, but are not limited to, polymerase chain reaction (PCR); ligation amplification (or ligase chain reaction (LCR)); amplification methods based on the use of Q-beta replicase or template-dependent polymerase (e.g., U.S. Patent Publication Number US20050287592); helicase-dependent isothermal amplification (Vincent et al., “Helicase-dependent isothermal DNA amplification”. EMBO reports 5 (8): 795-800 (2004)); strand displacement amplification (SDA); thermophilic SDA nucleic acid sequence-based amplification (3SR or NASBA), and transcription-associated amplification (TAA). Non-limiting examples of PCR amplification methods include standard PCR, AFLP-PCR, allele-specific PCR, Alu-PCR, asymmetric PCR, colony PCR, hot start PCR, inverse PCR (IPCR), in situ PCR (ISH), intersequence-specific PCR (ISSR-PCR), long PCR, multiplex PCR, nested PCR, quantitative PCR (qPCR), touchdown PCR, reverse transcriptase PCR (RT-PCR), reverse transcriptase quantitative PCR (RT-qPCR), TAQMAN qPCR, real time PCR, single cell PCR, solid phase PCR, combinations thereof, and the like. Reagents and hardware for conducting PCR are commercially available.

[0206] It is understood by those of skill in the art that modifications to these PCR protocols can be made to achieve the same or similar results. For example, the temperatures for the various steps in the can be modified by between about 1-5° C., or touchdown PCR can be performed, i.e., the annealing temperature is adjusted based on the cycle number.

[0207] A generalized description of an amplification process is as follows. Primers and target nucleic acid are contacted, and complementary sequences hybridize to one another, for example. Primers can hybridize to a target nucleic acid, at or near (e.g., adjacent to, abutting, and the like) a sequence of interest. A reaction mixture, containing components necessary for enzymatic functionality, is added to the primer-target nucleic acid hybrid, and amplification can occur under suitable conditions. Components of an amplification reaction can include, but are not limited to, e.g., primers (e.g., individual primers, primer pairs, a plurality of primer pairs, and the like) a polynucleotide template (e.g., target nucleic acid), polymerase, nucleotides, dNTPs and the like. In embodiments, non-naturally occurring nucleotides or nucleotide analogs, such as analogs containing a detectable label (e.g., fluorescent or colorimetric label), can be used for example.

[0208] Any suitable polymerase can be selected, which can include polymerases for thermocycle amplification (e.g., Taq DNA Polymerase; Q-Bio™ Taq DNA Polymerase (recombinant truncated form of Taq DNA Polymerase lacking 5′-3′exo activity); SurePrime™ Polymerase (chemically modified Taq DNA polymerase for “hot start” PCR); Arrow™ Taq DNA Polymerase (high sensitivity and long template amplification)) and polymerases for thermostable amplification (e.g., RNA polymerase for transcription-mediated amplification (TMA) described at World Wide Web URL “gen-probe.com/pdfs/tma_whiteppr.pdf”). Other enzyme components can be added, such as reverse transcriptase for transcription mediated amplification (TMA) reactions, for example.

[0209] PCR conditions can be dependent upon primer sequences, target abundance, and the desired amount of amplification, and therefore, any suitable PCR protocol may be selected. PCR is typically carried out as an automated process with a thermostable enzyme. In this process, the temperature of the reaction mixture is cycled through a denaturing step, a primer-annealing step, and an extension reaction step automatically. Some PCR protocols also include an activation step and a final extension step. Machines specifically adapted for this purpose are commercially available. A non-limiting example of a PCR protocol that may be suitable for embodiments described herein is as follows: treating the sample at 95° C. for 2 minutes; repeating 40 cycles of 95° C. for 15 seconds and 60° C. for 30 seconds. Additional examples of suitable PCR protocols are provided in the working examples herein. A completed PCR reaction can optionally be kept at 4° C. until further action is desired. Multiple cycles frequently are performed using a commercially available thermal cycler. Suitable isothermal amplification processes also can be applied, in certain embodiments.

[0210] In certain embodiments, an amplification product can include naturally occurring nucleotides, non-naturally occurring nucleotides, nucleotide analogs and the like and combinations of the foregoing. An amplification product often has a nucleotide sequence that is identical to or substantially identical to a sample nucleic acid nucleotide sequence or complement thereof. A “substantially identical” nucleotide sequence in an amplification product will generally have a high degree of sequence identity to the nucleotide sequence species being amplified or complement thereof (e.g., about 75%, 76%, 77%, 78%, 79%, 80%, 81%, 82%, 83%, 84%, 85%, 86%, 87%, 88%, 89%, 90%, 91%, 92%, 93%, 94%, 95%, 96%, 97%, 98%, 99% or greater than 99% sequence identity), and variations sometimes are a result of infidelity of the polymerase used for extension and/or amplification, or additional nucleotide sequence(s) added to the primers used for amplification.

[0211] In embodiments, where a target nucleic acid is RNA, prior to the amplification step, a DNA copy (cDNA) of the RNA transcript of interest may be synthesized. A cDNA can be synthesized by reverse transcription, which can be carried out as a separate step, or in a homogeneous reverse transcription-polymerase chain reaction (RT-PCR), a modification of the polymerase chain reaction for amplifying RNA.

[0212] Amplification also can be accomplished using digital PCR, in certain embodiments. Digital PCR takes advantage of nucleic acid (DNA, cDNA or RNA) amplification on a single molecule level and offers a highly sensitive method for quantifying low copy number nucleic acid. Systems for digital amplification and analysis of nucleic acids are available (e.g., Fluidigm® Corporation).

[0213] Amplification reactions can be performed as individual amplification reactions, where one primer pair is used for each reaction and the presence or absence of one amplification product is detected. In certain embodiments, multiple individual amplification reactions may be performed (i.e., carried out in separate containers) using a different set of primers for each reaction, and the presence or absence of an amplification product is detected for each individual reaction. In embodiments, amplification reactions are performed as multiplex amplification reactions (i.e., a plurality of amplification reactions performed in a single container), where a plurality of primer pairs is used for the multiplex reaction, and the presence or absence of more than one amplification product is detected. Both individual amplification reactions and multiplex amplification reactions are contemplated for the primers provided herein.

[0214] In certain embodiments, a method provided herein includes generating nucleic acid amplification products from a plant sample. Such methods include contacting nucleic acid of a plant sample with a pair of polynucleotide primers under conditions wherein the pair of polynucleotide primers hybridize to and amplify a unique subsequence, when present, in a TPS gene or a paralog thereof in the genome (or cDNA, e.g., for obtaining an expression profile) of a plant cultivar.

### Quantitative PCR

[0215] In certain embodiments, an amplification method includes a quantifiable amplification method. For example, levels of expression of a TPS synthase gene or a paralog thereof can be measured using a quantitative PCR (qPCR) approach (e.g., on cDNA generated from RNA from a plant sample), or a reverse transcriptase quantitative PCR (RT-qPCR) approach (e.g., on RNA from a plant sample). Quantitative PCR (qPCR), which also can be referred to a real-time PCR, monitors the amplification of a targeted nucleic acid molecule during a PCR reaction (i.e., in real time). This method can be used quantitatively (quantitative real-time PCR) and semi-quantitatively (i.e., above/below a certain amount of nucleic acid molecules; semi-quantitative real-time PCR). The primers can be gene-specific probes that quantitate each amplicon (i.e., individual TPS genes), or they can be class-specific probes, e.g., to quantitate all monoterpene synthases, all diterpene synthases, all sesquiterpene synthases or combinations thereof in the TPS gene profile of the plant cultivar.

[0216] Methods for qPCR include use of non-specific fluorescent dyes that intercalate with double-stranded DNA, and sequence-specific DNA probes labelled with a fluorescent reporter, which generally allows detection after hybridization of the probe with its complementary sequence. Quantitative PCR methods typically are performed in a thermal cycler with the capacity to illuminate each sample with a beam of light of at least one specified wavelength and detect the fluorescence emitted by an excited fluorophore.

[0217] For non-specific detection, a DNA-binding dye can bind to all double-stranded (ds) DNA during PCR. An increase in DNA product during PCR therefore leads to an increase in fluorescence intensity measured at each cycle. For qPCR using dsDNA dyes, the reaction typically is prepared like a basic PCR reaction, with the addition of fluorescent dsDNA dye. Then the reaction is run in a real-time PCR instrument, and after each cycle, the intensity of fluorescence is measured with a detector (the dye only fluoresces when bound to the dsDNA (i.e., the PCR product)). In certain applications, multiple target sequences can be monitored in a tube by using different types of dyes.

[0218] For specific detection, fluorescent reporter probes detect only the DNA containing the sequence complementary to the probe. Accordingly, use of the reporter probe can, in embodiments, increase specificity and facilitate performing the technique even in the presence of other dsDNA. Using different types of labels, fluorescent probes can be used in multiplex assays for monitoring several target sequences in the same tube. This method typically uses a DNA-based probe with a fluorescent reporter at one end and a quencher of fluorescence at the opposite end of the probe. The close proximity of the reporter to the quencher prevents detection of its fluorescence. During PCR, the probe is broken down by the 5′ to 3′ exonuclease activity of the polymerase, which breaks the reporter-quencher proximity and thus permits unquenched emission of fluorescence, which can be detected after excitation with a laser. An increase in the product targeted by the reporter probe at each PCR cycle therefore causes a proportional increase in fluorescence due to the breakdown of the probe and release of the reporter.

[0219] In certain embodiments, a method provided herein includes contacting nucleic acid of a plant sample with one or more primer pairs and one or more quantitative PCR probes. For example, certain primers provided herein (e.g., primers provided in Table 2) can be used in combination with certain qPCR probes.

### Loop Mediated Isothermal Amplification (LAMP)

[0220] In certain embodiments, an amplification method includes loop mediated isothermal amplification (LAMP). Loop-mediated isothermal amplification (LAMP) is a single-tube technique useful for nucleic acid amplification. Reverse transcription loop-mediated isothermal amplification (RT-LAMP) combines LAMP with a reverse transcription step for the detection of RNA. LAMP is typically performed under isothermal conditions. In contrast to a polymerase chain reaction (PCR) technology, which is typically performed using a series of alternating temperature cycles, isothermal amplification is performed at a constant temperature, and does not require a thermal cycler.

[0221] In LAMP, a target sequence is amplified at a constant temperature (e.g., between about 60° C. to about 65° C.) using a plurality of primer pairs (e.g., two primer pairs, three primer pairs) and a polymerase (e.g., a polymerase with high strand displacement activity). In certain applications, four different primers can be used to amplify six distinct regions on a target sequence, for example, which can increase specificity. An additional pair of loop primers can further accelerate the reaction.

[0222] The amplification product can be detected via photometry (i.e., measuring the turbidity caused by magnesium pyrophosphate precipitate in solution as a byproduct of amplification). This generally allows for visualization by the naked eye or by photometric detection approaches (e.g., for small volumes). In certain applications, the reaction can be followed in real-time either by measuring turbidity or by fluorescence using intercalating dyes (e.g., SYTO 9, SYBR green). Certain dyes can be used to create a visible color change that can be seen with the naked eye without the need for specialized equipment. Dye molecules intercalate or directly label the DNA, and in turn can be correlated with the number of copies initially present. Accordingly, certain variations of LAMP can be quantitative. Detection of LAMP amplification products also can be achieved using manganese loaded calcein, which starts fluorescing upon complexation of manganese by pyrophosphate during in vitro DNA synthesis. Another method for visual detection of LAMP amplification products by the naked eye is based on the ability of the products to hybridize with complementary gold-bound single-stranded DNA, which prevents a red to purple-blue color change that would otherwise occur during salt-induced aggregation of the gold particles.

[0223] A number of LAMP visualization technologies are known to those of skill in the art (see, e.g., Fischbach et al., Biotechniques, 58(4): 189-194 (2015), the contents of which are incorporated in their entirety by reference herein). Examples of such visualization reagents, summarized in the Table below from Fischbach et al., include magnesium pyrophosphate, hydroxynaphthol blue (HNB), calcein, SYBR Green I, EvaGreen and the nucleic acid-specific dye, berberine, which emits a fluorescent signal under UV light after a positive LAMP reaction.

| | | Hydroxynaphthol | | | | |
|---|---|---|---|---|---|---|
| | Turbidity | blue | Calcein | SYBR Green I | EvaGreen | Berberine |
| Substance | Mg-pyrophosphate | Hydroxynaphthol | Calcein AM + MnCl₂ | SYBR Green I | EvaGreen | Berberine-SO₄ |
| | (Mg-PPi) | blue (HNB) | | | | |
| Origin | Amplification | Synthetic | Synthetic | Synthetic | Synthetic | Natural |
| | product | | | | | |
| Toxicity | None | May cause eye | May be harmful to | Mutation enhancer | Possible carcinogen | May be toxic in high |
| | | irritation | skin and eyes | | | concentrations |
| Detection | Insoluble complex; | Decrease of free | Decrease of free | dsDNA intercalation | dsDNA intercalation | Small groove |
| Mechanism | precipitation | Mg²⁺ | Mn²⁺ | | | intercalation |
| Readout | Turbidity | Absorption | Fluorescence | Fluorescence | Fluorescence | Fluorescence |
| | Absorbance: | Absorbance: | Excitation: 495 nm | Excitation: 494 nm | Excitation: 500 nm | Excitation: 450 nm |
| | 400 nm | 650 nm | Emission: 515 nm | Emission: 521 nm | Emission: 530 nm | Emission: 530 nm |
| Effect on | None | None | Manganese may | Not inhibiting when | Not inhibiting when | Not inhibiting |
| amplification | | | inhibit reaction | used 0.5-1× | used 0.5-1× | (≤180 μM) |
| One-pot | + + | − | + + + | + + + + | + + + + | + + + + |
| real-time | | | | | | |
| assay | | | | | | |
| Equipment for | Turbidometer | − | Fluorometer with | Fluorometer with | Fluorometer with | Fluorometer with |
| real-time | | | FAM filter | FAM filter | FAM filter | FAM filter |
| detection | | | | | | |
| One-pot end | + + + | + + + + | + + + + | − | − | + + + |
| point assay | | | | | | (UV light with low |
| | | | | | | background signal) |
| Equipment for | None (cordless | None | UV lamp | Not applicable | Not applicable | UV lamp |
| end point | centrifuge) | | (optional) | | | |
| detection | | | | | | |
| Evaluation of | + Turbid | + Sky blue | + Green | + Fluorescence | + Fluorescence | + Fluorescence |
| results | − Clear | − Violet | − Orange | signal | signal | signal |
| | | | | − No signal | − No signal | − No signal |
| Percentage of | 0 | <0.1 | <0.1 | 26.01 | 1.18 | 0.82 |
| overall costs * | | | | | | |
| Relative | + + + | + + + | + + + | + + + | + + + | + + + |
| sensitivity | | | | | | |
| * * | | | | | | |
| Field | + + + | + + + + | + + + + | + + | + + | + + + + |
| applicability | | | | | | |
| * * * | | | | | | |

Summary of features relevant for in-the-field loop-mediated isothermal amplification (LAMP) assays tested for detection of potato spindle tuber viroid (PSTVd).
Number of “+” describes the applicability/relevance of the feature.
* Overall costs represent the basic chemicals of common suppliers for one LAMP reaction, dependingon reaction volume.
* * In our assays. Analytical sensitivity may depend on LAMP setup and has to be optimized separately.
* * * Depending on visualization.

[0224] In embodiments, a method herein includes contacting nucleic acid of a plant sample with a set of loop mediated isothermal amplification (LAMP) primers. For example, Cannabis plant cultivars, or offspring thereof, containing particular TPS genes can be identified via a LAMP assay. In aspects, the LAMP assay can be a colorimetric assay. Examples of LAMP primer sets that can be used to identify Cannabis plant cultivars, or offspring thereof, containing a terpinolene producing TPS gene (csTPS37FN) are shown in Table 5 below:

TABLE 5
5 LAMP primer sets for Terpinolene-producing gene, csTPS37FN

| | | | dimer (minimum) dG = −2.36 | | | | | |
|---|---|---|---|---|---|---|---|---|
| Set 1 | | 1381-2005 | | | | | GC | |
| label | 5′pos | 3′pos | len | Tm | 5′dG | 3′dG | rate | Sequence (SEQ ID NO) |
| F3 | 134 | 151 | 18 | 57.55 | −4.41 | −4.16 | 0.5 | TCAGTTGGGGGACCAATT (1285) |
| B3 | 332 | 350 | 19 | 56.29 | −5.68 | −4.27 | 0.53 | CATCCGACGATGTTCCTAG (1286) |
| FIP | | | 47 | | | | | GGATCATCATAACCTTCTTCCAAGA-TCTTTTGCATGCTTATTTTGCT |
| | | | | | | | | (1287) |
| BIP | | | 47 | | | | | TGAAGGATCCCTGGAAATATCAAAT-TCTTCAAGTCGTAAAAGTATGG |
| | | | | | | | | (1288) |
| F2 | 154 | 175 | 22 | 57.4 | −3.52 | −4.91 | 0.32 | TCTTTTGCATGCTTATTTTGCT (1289) |
| F1c | 210 | 234 | 25 | 60.23 | −4.76 | −4.86 | 0.4 | GGATCATCATAACCTTCTTCCAAGA (1290) |
| B2 | 306 | 327 | 22 | 55.41 | −4.27 | −4.23 | 0.36 | TCTTCAAGTCGTAAAAGTATGG (1291) |
| B1c | 250 | 274 | 25 | 60.09 | −4.86 | −3.57 | 0.36 | TGAAGGATCCCTGGAAATATCAAAT (1292) |
| LF | 178 | 202 | 25 | 60.48 | −5.7 | −4.33 | 0.4 | GGAAGCTTTTTCTAAGGGATTIGTG (1293) |
| | | | dimer (minimum) dG = −2.16 | | | | | |
| Set 2 | | 1381-2005 | | | | | GC | |
| label | 5′pos | 3′pos | len | Tm | 5′dG | 3′dG | rate | Sequence |
| F3 | 233 | 257 | 25 | 56.76 | −5.3 | −4.24 | 0.32 | CCTTCCATAAATATTCATGAAGGAT (1294) |
| B3 | 425 | 442 | 18 | 55.77 | −2.39 | −7.2 | 0.44 | AAATTTGATGTGCTCGCG (1295) |
| FIP | | | 47 | | | | | TCAAGTCGTAAAAGTATGGATCCAA-CCTGGAAATATCAAATGATGGT |
| | | | | | | | | (1296) |
| BIP | | | 43 | | | | | CTAGGAACATCGTCGGATGAGA-CAGAAACACCTGTATCATTCA |
| | | | | | | | | (1297) |
| F2 | 259 | 280 | 22 | 55.91 | −5.7 | −4.9 | 0.36 | CCTGGAAATATCAAATGATGGT (1298) |
| F1c | 300 | 324 | 25 | 60.07 | −4.41 | −4.41 | 0.36 | TCAAGTCGTAAAAGTATGGATCCAA (1299) |
| B2 | 393 | 413 | 21 | 55.12 | −4.02 | −4.07 | 0.38 | CAGAAACACCTGTATCATTCA (1300) |
| B1c | 332 | 353 | 22 | 60.75 | −4.27 | −4.15 | 0.5 | CTAGGAACATCGTCGGATGAGA (1301) |
| LB | 359 | 383 | 25 | 60.89 | −4.94 | −3.67 | 0.4 | AGAGGAGATGTTCCGAAATCAATTC (1302) |
| | | | dimer (minimum) dG = −1.69 | | | | | |
| Set 3 | | 1381-2005 | | | | | GC | |
| label | 5′pos | 3′pos | len | Tm | 5′dG | 3′dG | rate | Sequence |
| F3 | 210 | 231 | 22 | 56.36 | −4.86 | −4.32 | 0.36 | TCTTGGAAGAAGGTTATGATGA (1303) |
| B3 | 425 | 442 | 18 | 55.77 | −2.39 | −7.2 | 0.44 | AAATTTGATGTGCTCGCG (1304) |
| FIP | | | 48 | | | | | TCAAGTCGTAAAAGTATGGATCCAA-TAAATATTCATGAAGGATCCCTG |
| | | | | | | | | (1305) |
| BIP | | | 43 | | | | | CTAGGAACATCGTCGGATGAGA-CAGAAACACCTGTATCATTCA |
| | | | | | | | | (1306) |
| F2 | 240 | 262 | 23 | 55.42 | −1.98 | −5.7 | 0.35 | TAAATATTCATGAAGGATCCCTG (1307) |
| F1c | 300 | 324 | 25 | 60.07 | −4.41 | −4.41 | 0.36 | TCAAGTCGTAAAAGTATGGATCCAA (1308) |
| B2 | 393 | 413 | 21 | 55.12 | −4.02 | −4.07 | 0.38 | CAGAAACACCTGTATCATTCA (1309) |
| B1c | 332 | 353 | 22 | 60.75 | −4.27 | −4.15 | 0.5 | CTAGGAACATCGTCGGATGAGA (1310) |
| LB | 359 | 383 | 25 | 60 89 | −4.94 | −3.67 | 0.4 | AGAGGAGATGTTCCGAAATCAATTC (1311) |
| | | | dimer(minimum) dG = −2.36 | | | | | |
| Set 4 | | 1522-1776 | | | | | GC | |
| label | 5′pos | 3′pos | len | Tm | 5′dG | 3′dG | rate | Sequence |
| F3 | 1 | 21 | 21 | 56.35 | −6.3 | −5.08 | 0.38 | GGGACCAATTATTCTTTTGCA (1312) |
| B3 | 191 | 209 | 19 | 56.29 | −5.68 | −4.27 | 0.53 | CATCCGACGATGTTCCTAG (1313) |
| FIP | | | 48 | | | | | GGATCATCATAACCTTCTTCCAAGA-GCTTATTTTGCTTTCACAAATCC |
| | | | | | | | | (1314) |
| BIP | | | 47 | | | | | ATGAAGGATCCCTGGAAATATCAAA-TCTTCAAGTCGTAAAAGTATGG |
| | | | | | | | | (1315) |
| F2 | 23 | 45 | 23 | 57.04 | −3.97 | −4.01 | 0.35 | GCTTATTTTGCTTTCACAAATCC (1316) |
| F1c | 69 | 93 | 25 | 60.23 | −4.76 | −4.86 | 0.4 | GGATCATCATAACCTTCTTCCAAGA (1317) |
| B2 | 165 | 186 | 22 | 55.41 | −4.27 | −4.23 | 0.36 | TCTTCAAGTCGTAAAAGTATGG (1318) |
| B1c | 108 | 132 | 25 | 60.09 | −3.9 | −3.57 | 0.36 | ATGAAGGATCCCTGGAAATATCAAA (1319) |
| | | | dimer (minimum) dG = −2.30 | | | | | |
| Set 5 | | 1522-1776 | | | | | GC | |
| label | 5′pos | 3′pos | len | Tm | 5′dG | 3′dG | rate | Sequence |
| F3 | 38 | 58 | 21 | 55.06 | −3.71 | −4.74 | 0.33 | ACAAATCCCTTAGAAAAAGCT (1320) |
| B3 | 206 | 227 | 22 | 55.62 | −4.25 | −4.25 | 0.41 | CATCTCCTCTTTTCATCTCATC (1321) |
| FIP | | | 49 | | | | | TTCCAGGGATCCTTCATGAATATTT-CCATAAAATTCTTGGAAGAAGGTT |
| | | | | | | | | (1322) |
| BIP | | | 44 | | | | | ACCCTACCATATTTCATCTTGGATC-CGACGATGTTCCTAGGTCA |
| | | | | | | | | (1323) |
| F2 | 60 | 83 | 24 | 57.31 | −3.74 | −4.5 | 0.33 | CCATAAAATTCTTGGAAGAAGGTT (1324) |
| F1c | 100 | 124 | 25 | 60.09 | −4.86 | −2.28 | 0.36 | TTCCAGGGATCCTTCATGAATATTT (1325) |
| B2 | 187 | 205 | 19 | 57.8 | −6.37 | −5.25 | 0.53 | CGACGATGTTCCTAGGTCA (1326) |
| B1c | 141 | 165 | 25 | 60.11 | −4.92 | −4.76 | 0.4 | ACCCTACCATATTTCATCTTGGATC (1327) |

### Detection of Amplification Products

[0225] Amplification products generated by a method provided herein can be detected by a suitable detection process. Non-limiting examples of methods of detection include electrophoresis, nucleic acid sequencing, mass spectrometry, mass detection of mass modified amplicons (e.g., matrix-assisted laser desorption ionization (MALDI) mass spectrometry and electrospray (ES) mass spectrometry), a primer extension method (e.g., iPLEX™; Sequenom, Inc.), Molecular Inversion Probe (MIP) technology from Affymetrix, restriction fragment length polymorphism (RFLP analysis), allele specific oligonucleotide (ASO) analysis, methylation-specific PCR (MSPCR), pyrosequencing analysis, acycloprime analysis, Reverse dot blot, GeneChip microarrays, Dynamic allele-specific hybridization (DASH), Peptide nucleic acid (PNA) and locked nucleic acids (LNA) probes, TaqMan, Molecular Beacons, Intercalating dye, FRET primers, AlphaScreen, SNPstream, genetic bit analysis (GBA), Multiplex minisequencing, SNAPshot, GOOD assay, Microarray miniseq, arrayed primer extension (APEX), Microarray primer extension, Tag arrays, coded microspheres, template-directed incorporation (TDI), fluorescence polarization, colorimetric oligonucleotide ligation assay (OLA), sequence-coded OLA, microarray ligation, ligase chain reaction, padlock probes, invader assay, hybridization using at least one probe, hybridization using at least one fluorescently labeled probe, cloning and sequencing, the use of hybridization probes and quantitative real time polymerase chain reaction (QRT-PCR), digital PCR, nanopore sequencing, chips, and combinations thereof.

[0226] In certain embodiments, amplification products are detected using electrophoresis. Any suitable electrophoresis method, whereby amplified nucleic acids are separated by size, can be used in conjunction with the methods provided herein, which include, but are not limited to, standard electrophoretic techniques and specialized electrophoretic techniques, such as, for example capillary electrophoresis (e.g., Capillary Zone Electrophoresis (CZE), also known as free-solution CE (FSCE), Capillary Isoelectric Focusing (CIEF), Isotachophoresis (ITP), Electrokinetic Chromatography (EKC), Micellar Electrokinetic Capillary Chromatography (MECC OR MEKC), Micro Emulsion Electrokinetic Chromatography (MEEKC), Non-Aqueous Capillary Electrophoresis (NACE), and Capillary Electrochromatography (CEC)).

[0227] non-limiting standard electrophoresis example is presented as follows. After running an amplified nucleic acid sample in an agarose or polyacrylamide gel, the gel can be labeled (e.g., stained) with ethidium bromide (see, Sambrook and Russell, Molecular Cloning: A Laboratory Manual 3d ed., 2001). The presence of a band of the same size as the standard control is an indication of the presence of a target nucleic acid sequence, the amount of which can then be compared to the control based on the intensity of the band, thus detecting and quantifying the target sequence of interest. In embodiments, where a plurality of primer pairs is used in an amplification reaction, multiple amplification products of varying size can be detected using electrophoresis.

### High Resolution Melting (HRM)

[0228] In certain embodiments, nucleic acid is analyzed in the methods provided herein using a high-resolution melting (HRM) endpoint assay. In embodiments, an analysis includes performing a high-resolution melting (HRM) endpoint assay on amplification products (e.g., amplification products generated using primers provided herein). In embodiments, an analysis includes performing a high-resolution melting (HRM) endpoint assay on nucleic acid in a mixture (e.g., a mixture of amplification products generated using a plurality of primer pairs).

[0229] High resolution melt or high-resolution melting (HRM) analysis is a technique useful for the detection of mutations, polymorphisms, and epigenetic differences in double-stranded DNA. Typically, amplification (e.g., a polymerase chain reaction (PCR)) is performed prior to HRM analysis to amplify a DNA region in which a mutation or other variant of interest is located. The HRM process involves a precise warming of the amplification product from around 50° C. up to around 95° C. At some point during this process, the melting temperature of the amplicon is reached and the two strands of DNA separate (i.e., melt apart).

[0230] The separation of strands can be monitored in real-time (e.g., using a fluorescent dye). Dyes that can be used for HRM include intercalating dyes, which specifically bind to double-stranded DNA and emit fluorescence when bound to DNA. At the start of an HRM analysis there is a high level of fluorescence in the sample because of the billions of copies of the amplicon. However, as the sample is heated up and the two strands of the DNA melt apart, presence of double stranded DNA decreases, and thus the fluorescence is reduced. In certain configurations, an HRM machine has a camera that monitors this process by measuring the fluorescence. The machine can plot the data (e.g., as a graph sometimes referred to as a melt curve), showing the level of fluorescence vs. temperature.

[0231] The melting temperature of an amplification product at which the two DNA strands come apart is a predictable parameter, and typically is dependent on the DNA sequence of the amplicon. When comparing two samples from two different plants containing the same TPS gene, for example, amplification products from both samples should have the same shaped melt curve. However, if one of the plants contains a TPS gene variant, this will alter the temperature at which the DNA strands melt apart. Accordingly, the two melt curves will be different. The difference can be subtle, but because HRM machines typically are capable of monitoring the HRM process in high resolution, it generally is possible to accurately document these changes and therefore identify if a mutation or variant is present or absent.

[0232] In certain embodiments, an analysis includes detecting one or more genetic variations (e.g., single nucleotide substitutions) in a TPS gene or paralog thereof according to results obtained from a high-resolution melting (HRM) endpoint assay. In embodiments, an analysis includes detecting two or more genetic variations (e.g., single nucleotide substitutions) in a in a TPS gene or paralog thereof, according to results obtained from a high-resolution melting (HRM) endpoint assay. In certain embodiments, an analysis includes detecting three or more genetic variations (e.g., single nucleotide substitutions) in a TPS gene or paralog thereof, according to results obtained from a high-resolution melting (HRM) endpoint assay. In certain embodiments, an analysis includes detecting four or more genetic variations (e.g., single nucleotide substitutions) in a TPS gene or paralog thereof, according to results obtained from a high-resolution melting (HRM) endpoint assay. In certain embodiments, an analysis includes detecting five or more genetic variations (e.g., single nucleotide substitutions) in a TPS gene or paralog thereof, according to results obtained from a high-resolution melting (HRM) endpoint assay. In certain embodiments, an analysis includes detecting six or more genetic variations (e.g., single nucleotide substitutions) in a TPS gene or paralog thereof, according to results obtained from a high-resolution melting (HRM) endpoint assay. In certain embodiments, an analysis includes detecting seven or more genetic variations (e.g., single nucleotide substitutions) in a TPS gene or paralog thereof, according to results obtained from a high-resolution melting (HRM) endpoint assay. In certain embodiments, an analysis includes detecting eight or more genetic variations (e.g., single nucleotide substitutions) in a TPS gene or paralog thereof, according to results obtained from a high-resolution melting (HRM) endpoint assay. In certain embodiments, an analysis includes detecting nine or more genetic variations (e.g., single nucleotide substitutions) in a TPS gene or paralog thereof, according to results obtained from a high-resolution melting (HRM) endpoint assay. In certain embodiments, an analysis includes detecting ten or more genetic variations (e.g., single nucleotide substitutions) in a TPS gene or paralog thereof, according to results obtained from a high-resolution melting (HRM) endpoint assay.

### Nucleic Acid Sequencing

[0233] In certain embodiments of the methods provided herein, the nucleic acid is sequenced. In embodiments, amplified subsequences of a TPS gene or a paralog thereof are sequenced by a sequencing process. In embodiments, the sequencing process generates sequence reads (or sequencing reads). In certain embodiments, a method herein comprises determining the sequence of a unique subsequence, such as an exon or a portion thereof, of a TPS gene or a paralog thereof, based on the sequence reads. In certain embodiments, a method provided herein includes determining the TPS gene profile, and/or the TPS gene expression profile, of a plant cultivar based on the sequence reads. In embodiments, the methods provided herein include determining one or TPS gene profiles of one or more plant cultivars based on the sequence reads.

[0234] Nucleic acid can be sequenced using any suitable sequencing platform, non-limiting examples of which include Maxim & Gilbert, chain-termination methods, sequencing by synthesis, sequencing by ligation, sequencing by mass spectrometry, microscopy-based techniques, the like or combinations thereof. In some embodiments, a first-generation technology, such as, for example, Sanger sequencing methods including automated Sanger sequencing methods, including microfluidic Sanger sequencing, can be used in a method provided herein. In some embodiments, sequencing technologies that include the use of nucleic acid imaging technologies (e.g., transmission electron microscopy (TEM) and atomic force microscopy (AFM)), can be used. In embodiments, a high-throughput sequencing method can be used. High-throughput sequencing methods generally involve clonally amplified DNA templates or single DNA molecules that are sequenced in a massively parallel fashion, sometimes within a flow cell. Next generation (e.g., 2nd and 3rd generation) sequencing techniques capable of sequencing DNA in a massively parallel fashion can be used for methods described herein and are collectively referred to herein as “massively parallel sequencing” (MPS). In embodiments, MPS sequencing methods utilize a targeted approach, where specific chromosomes, genes or regions of interest are sequenced. For example, a targeted approach can include targeting specific TPS genes, or specific unique subsequences of a TPS gene, for sequencing. In certain embodiments, a non-targeted approach is used where most or all nucleic acids in a sample are sequenced, amplified and/or captured randomly.

[0235] Non-limiting examples of sequencing platforms include a sequencing platform provided by Illumina® (e.g., HiSeq™, HiSeq™ 2000, MiSeq™, Genome Analyzer™, and Genome Analyzer™ II sequencing systems); Oxford Nanopore™ Technologies (e.g., MinION sequencing system), Ion Torrent™ (e.g., Ion PGM™ and/or Ion Proton™ sequencing systems); Pacific Biosciences (e.g., PACBIO RS II sequencing system); Life Technologies™ (e.g., SOLID sequencing system); Roche (e.g., 454 GS FLX+ and/or GS Junior sequencing systems); Helicos True Single Molecule Sequencing; Ion semiconductor-based sequencing (e.g., as developed by Life Technologies), WildFire, 5500, 5500xl W and/or 5500xl W Genetic Analyzer based technologies (e.g., as developed and sold by Life Technologies, U.S. Patent Application Publication No. 2013/0012399); Polony sequencing, Pyrosequencing, Massively Parallel Signature Sequencing (MPSS), RNA polymerase (RNAP) sequencing, LaserGen systems and methods, Nanopore-based platforms, chemical-sensitive field effect transistor (CHEMFET) array, electron microscopy-based sequencing (e.g., as developed by ZS Genetics, Halcyon Molecular), nanoball sequencing; or any other suitable sequencing platform. Other sequencing methods that can be used to conduct methods herein include digital PCR, sequencing by hybridization, nanopore sequencing, chromosome-specific sequencing (e.g., using DANSR (digital analysis of selected regions) technology).

[0236] In certain embodiments, the sequencing process is a highly multiplexed sequencing process. In certain instances, a full or substantially full sequence is obtained and sometimes a partial sequence is obtained. Nucleic acid sequencing generally produces a collection of sequence reads. As used herein, “reads” (e.g., “a read,” “a sequence read”) are short sequences of nucleotides produced by any sequencing process described herein or known in the art. Reads can be generated from one end of nucleic acid fragments (single-end reads), and sometimes are generated from both ends of nucleic acid fragments (e.g., paired-end reads, double-end reads). In embodiments, a sequencing process generates short sequencing reads or “short reads.” In embodiments, the nominal, average, mean or absolute length of short reads sometimes is about 10 continuous nucleotides to about 250 or more contiguous nucleotides. In certain embodiments, the nominal, average, mean or absolute length of short reads sometimes is about 50 continuous nucleotides to about 150 or more contiguous nucleotides.

[0237] The length of a sequence read often is associated with the particular sequencing technology utilized. High-throughput methods, for example, provide sequence reads that can vary in size from tens to hundreds of base pairs (bp). Nanopore sequencing, for example, can provide sequence reads that can vary in size from tens to hundreds to thousands of base pairs. In some embodiments, sequence reads are of a mean, median, average or absolute length of about 15 bp to about 900 bp long. In certain embodiments sequence reads are of a mean, median, average or absolute length of about 1000 bp or more. In some embodiments, sequence reads are of a mean, median, average or absolute length of about 100 bp to about 200 bp.

[0238] Reads generally are representations of nucleotide sequences in a physical nucleic acid. For example, in a read containing an ATGC depiction of a sequence, “A” represents an adenine nucleotide, “T” represents a thymine nucleotide, “G” represents a guanine nucleotide and “C” represents a cytosine nucleotide, in a physical nucleic acid.

[0239] In certain embodiments, “obtaining” nucleic acid sequence reads of a sample from a plant and/or “obtaining” nucleic acid sequence reads from one or more amplification products can involve directly sequencing nucleic acid to obtain the sequence information. In some embodiments, “obtaining” can involve receiving sequence information obtained directly from a nucleic acid by another.

[0240] In certain embodiments, some or all nucleic acids in a sample are enriched and/or amplified (e.g., non-specifically, or specifically using amplification primers described herein) prior to or during sequencing. In certain embodiments, specific nucleic acid species or subsets in a sample are enriched and/or amplified prior to or during sequencing. In some embodiments, nucleic acid from a pathogen may be enriched and/or amplified prior to or during sequencing, while nucleic acid from a host plant is not enriched and/or amplified prior to or during sequencing. For example, nucleic acid from the genome of the plant cultivar can be enriched and/or amplified prior to or during sequencing, while nucleic acid from the Cannabis genome is not enriched and/or amplified prior to or during sequencing. In embodiments, nucleic acids in a sample are not enriched and/or amplified prior to or during sequencing.

[0241] In certain embodiments, one nucleic acid sample from one plant is sequenced. In certain embodiments, nucleic acids from each of two or more samples are sequenced, where samples are from one plant or from different plants. In certain embodiments, nucleic acid samples from two or more biological samples are pooled, where each biological sample is from one plant or two or more plants, and the pool is sequenced. In the latter embodiments, a nucleic acid sample from each biological sample often is identified by one or more unique identifiers.

[0242] A sequencing method can utilize identifiers that allow multiplexing of sequence reactions in a sequencing process. The greater the number of unique identifiers, the greater the number of samples and/or chromosomes for detection, for example, that can be multiplexed in a sequencing process. A sequencing process can be performed using any suitable number of unique identifiers (e.g., 4, 8, 12, 24, 48, 96, or more).

[0243] A sequencing process sometimes makes use of a solid phase, and sometimes the solid phase comprises a flow cell on which nucleic acid from a library can be attached and reagents can be flowed and contacted with the attached nucleic acid. A flow cell sometimes includes flow cell lanes and use of identifiers can facilitate analyzing a number of samples in each lane A flow cell often is a solid support that can be configured to retain and/or allow the orderly passage of reagent solutions over bound analytes. Flow cells frequently are planar in shape, optically transparent, generally in the millimeter or sub-millimeter scale, and often have channels or lanes in which the analyte/reagent interaction occurs. In embodiments, the number of samples analyzed in a given flow cell lane is dependent on the number of unique identifiers utilized during library preparation and/or probe design. Multiplexing using 12 identifiers, for example, allows simultaneous analysis of 96 samples (e.g., equal to the number of wells in a 96 well microwell plate) in an 8-lane flow cell. Similarly, multiplexing using 48 identifiers, for example, allows simultaneous analysis of 384 samples (e.g., equal to the number of wells in a 384 well microwell plate) in an 8-lane flow cell. Non-limiting examples of commercially available multiplex sequencing kits include Illumina's multiplexing sample preparation oligonucleotide kit and multiplexing sequencing primers and PhiX control kit (e.g., Illumina's catalog numbers PE-400-1001 and PE-400-1002, respectively).

[0244] In some embodiments a targeted enrichment, amplification and/or sequencing approach is used. A targeted approach often isolates, selects and/or enriches a subset of nucleic acids in a sample for further processing by use of sequence-specific oligonucleotides. In some embodiments, a library of sequence-specific oligonucleotides are utilized to target (e.g., hybridize to) one or more sets of nucleic acids in a sample. Sequence-specific oligonucleotides and/or primers are often selective for particular sequences (e.g., unique nucleic acid sequences) present in one or more chromosomes, genes, exons, introns, and/or regulatory regions of interest. For example, primers specific for the unique subsequences in the TPS gene profile of a plant genome can be used for a targeted enrichment, amplification and/or sequencing approach. Any suitable method or combination of methods can be used for enrichment, amplification and/or sequencing of one or more subsets of targeted nucleic acids. In certain embodiments, targeted sequences are isolated and/or enriched by capture to a solid phase (e.g., a flow cell, a bead) using one or more sequence-specific anchors. In some embodiments targeted sequences are enriched and/or amplified by a polymerase-based method (e.g., a PCR-based method, by any suitable polymerase-based extension) using sequence-specific primers and/or primer sets (e.g., primers provided herein). Sequence specific anchors often can be used as sequence-specific primers.

[0245] In embodiments, nucleic acid is sequenced and the sequencing product (e.g., a collection of sequence reads) is processed prior to, or in conjunction with, an analysis of the sequenced nucleic acid. For example, sequence reads can be processed according to one or more of the following: aligning, mapping, filtering, counting, normalizing, weighting, generating a profile, and the like, and combinations thereof. Certain processing steps may be performed in any order and certain processing steps may be repeated.

### Solid Supports

[0246] Provided herein are solid supports that include the primers provided herein. The primers can directly be attached to the solid support, such as by covalent linkage, or can otherwise be associated with the solid support. For example, the primers can include, in addition to a sequence complementary to a unique subsequence of a TPS gene or paralog thereof in the genome of a plant cultivar of interest, a sequence that is complementary to a nucleic acid sequence that is directly attached to the solid support. The solid supports that include the primers provided herein can be contacted with nucleic acid from a sample obtained from a plant cultivar, under conditions that facilitate hybridization of a primer to a corresponding unique subsequence of a TPS gene or paralog thereof in the genome of a plant cultivar of interest. The resulting hybrids can directly be analyzed, such as by a signal or a label, for the presence or absence of hybridized product containing one or more primers specifically bound to a unique subsequence of a TPS gene in the nucleic acid. Alternately, the resulting hybrids can be subjected to polymerase-based extension reaction conditions using, e.g., one or more labeled nucleotides that can be incorporated into an extension product, thereby identifying, based on the presence or absence of a label in the extension product, whether a TPS gene or paralog thereof is present in the genome of a plant cultivar of interest.

[0247] The term “solid support” or “solid phase” as used herein refers to a wide variety of materials including solids, semi-solids, gels, films, membranes, meshes, felts, composites, particles, and the like typically used to sequester molecules, and more specifically refers to an insoluble material with which nucleic acid can be associated. A solid support for use with processes described herein sometimes is selected in part according to size: solid supports having a size smaller than the size a microreactor sometimes are selected. Examples of solid supports for use with processes described herein include, without limitation, beads (e.g., microbeads, nanobeads), particles (e.g., microparticles, nanoparticles) and chips.

[0248] The terms “beads” and “particles” as used herein refer to solid supports suitable for associating with biomolecules, and more specifically nucleic acids. Beads may have a regular (e.g., spheroid, ovoid) or irregular shape (e.g., rough, jagged), and sometimes are non-spherical (e.g., angular, multi-sided). Particles or beads having a nominal, average or mean diameter less than the nominal, average, mean or minimum diameter of a microreactor can be utilized. Particles or beads having a nominal, average or mean diameter of about 1 nanometer to about 500 micrometers can be utilized, such as those having a nominal, mean or average diameter, for example, of about 10 nanometers to about 100 micrometers; about 100 nanometers to about 100 micrometers; about 1 micrometer to about 100 micrometers; about 10 micrometers to about 50 micrometers; about 1, 5, 10, 15, 20, 25, 30, 35, 40, 45, 50, 55, 60, 65, 70, 75, 80, 85, 90, 95, 100, 200, 300, 400, 500, 600, 700, 800 or 900 nanometers; or about 1, 5, 10, 15, 20, 25, 30, 35, 40, 45, 50, 55, 60, 65, 70, 75, 80, 85, 90, 95, 100, 200, 300, 400, 500 micrometers.

[0249] A bead or particle can be made of virtually any insoluble or solid material. For example, the bead or particle can comprise or consist essentially of silica gel, glass (e.g. controlled-pore glass (CPG)), nylon, Sephadex®, Sepharose®, cellulose, a metal surface (e.g. steel, gold, silver, aluminum, silicon and copper), a magnetic material, a plastic material (e.g., polyethylene, polypropylene, polyamide, polyester, polyvinylidenedifluoride (PVDF)) and the like. Beads or particles may be swellable (e.g., polymeric beads such as Wang resin) or non-swellable (e.g., CPG). Commercially available examples of beads include without limitation Wang resin, Merrifield resin and Dynabeads®. Beads may also be made as solid particles or particles that contain internal voids.

[0250] The solid supports can be provided in a collection of solid supports. A solid support collection can include two or more different solid support species. The term “solid support species” as used herein refers to a solid support in association with one particular primer or primer pair provided herein, or a combination of different primers or primer pairs. In certain embodiments, a solid support includes about 1, 2, 3, 4, 5, 6, 7, 8, 9, 10, 15, 20, 25, 30, 35, 40, 45, 50, 55, 60, 65, 70, 75, 80, 85, 90, 95, 100, 200, 300, 400, 500, 600, 650 or 700 or more primers that specifically bind to unique subsequences of one or more TPS genes or paralogs thereof in one or more plant cultivars of interest. The solid supports (e.g., beads) in the collection of solid supports can be homogeneous (e.g., all are Wang resin beads) or heterogeneous (e.g., some are Wang resin beads, and some are magnetic beads). In certain embodiments, one or more primers selected from among SEQ ID NOS:1-1284 are attached or otherwise associated with a solid support, or a collection of solid supports. In embodiments, one or more primers selected from among those set forth in SEQ ID NOS: 1-1284, or sequences that share 90%, 91%, 92%, 93%, 94%, 95%, 96%, 97%, 98%, 99% or more identity with any of the sequences set forth in SEQ ID NOS: 1-1284, are attached or otherwise associated with a solid support, or a collection of solid supports.

[0251] The primers attached to the solid supports generally are single-stranded and are of any type suitable for hybridizing sample nucleic acid (e.g., DNA, RNA, analogs thereof (e.g., peptide nucleic acid (PNA)), chimeras thereof (e.g., a single strand comprises RNA bases and DNA bases) and the like). The primers can be associated with the solid support in any manner suitable for hybridization of the primers to nucleic acid from the plant cultivar. The primers can be in association with a solid support by a covalent linkage or a non-covalent interaction. Non-limiting examples of non-covalent interactions include hydrophobic interactions (e.g., C18 coated solid support and tritylated nucleic acid), polar interactions (e.g., “wetting” association between nucleic acid/polyethylene glycol), pair interactions including without limitation, antibody/antigen, antibody/antibody, antibody/antibody fragment, antibody/antibody receptor, antibody/protein A or protein G, hapten/anti-hapten, biotin/avidin, biotin/streptavidin, folic acid/folate binding protein, vitamin B12/intrinsic factor, nucleic acid/complementary nucleic acid (e.g., DNA, RNA, PNA) and the like.

[0252] The primers provided herein also can be associated with a solid support by different methodology, which include, without limitation (i) sequentially synthesizing nucleic acid directly on a solid support, and (ii) synthesizing nucleic acid, providing the nucleic acid in solution phase and linking the nucleic acid to a solid support. The primers can be linked covalently at various sites in the nucleic acid to the solid support, such as (i) at a 1′, 2′, 3′, 4′ or 5′ position of a sugar moiety or (ii) a pyrimidine or purine base moiety, of a terminal or non-terminal nucleotide of the nucleic acid, for example. The 5′ terminal nucleotide of the primer can be linked to the solid support, in certain embodiments.

[0253] Methods for sequentially synthesizing nucleic acid directly on a solid support are known. For example, the 3′ end of nucleic acid can be linked to the solid support (e.g., phosphoramidite method described in Caruthers, Science 230: 281-286 (1985)) or the 5′ end of the nucleic acid can be linked to the solid support (e.g., Claeboe et al, Nucleic Acids Res. 31(19): 5685-5691 (2003)).

[0254] Methods for linking solution phase nucleic acid to a solid support also are known (e.g., U.S. Pat. No. 6,133,436, naming Koster et al. and entitled “Beads bound to a solid support and to nucleic acids” and WO 91/08307, naming Van Ness and entitled “Enhanced capture of target nucleic acid by the use of oligonucleotides covalently attached to polymers”). Examples include, without limitation, thioether linkages (e.g., thiolated nucleic acid); disulfide linkages (e.g., thiol beads, thiolated nucleic acid); amide linkages (e.g., Wang resin, amino-linked nucleic acid); acid labile linkages (e.g., glass beads, tritylated nucleic acid) and the like. Nucleic acid can be linked to a solid support without a linker or with a linker (e.g., S. S. Wong, “Chemistry of Protein Conjugation and Cross-Linking,” CRC Press (1991), and G. T. Hermanson, “Bioconjugate Techniques,” Academic Press (1995). A homo or hetero-biofunctional linker reagent, can be selected, and examples of linkers include without limitation N-succinimidyl(4-iodoacetyl) aminobenzoate (SIAB), dimaleimide, dithio-bis-nitrobenzoic acid (DTNB), N-succinimidyl-S-acetyl-thioacetate (SATA), N-succinimidyl-3-(2-pyridyldithio) propionate (SPDP), succinimidyl 4-(N-maleimidomethyl)cyclohexane-1-carboxylate (SMCC), 6-hydrazinonicotimide (HYNIC), 3-amino-(2-nitrophenyl)propionic acid and the like.

[0255] Nucleic acid can be synthesized using standard methods and equipment, such as the ABI®3900 High Throughput DNA Synthesizer and EXPEDITE®8909 Nucleic Acid Synthesizer, both of which are available from Applied Biosystems (Foster City, CA). Analogs and derivatives are described in U.S. Pat. Nos. 4,469,863; 5,536,821; 5,541,306; 5,637,683; 5,637,684; 5,700,922; 5,717,083; 5,719,262; 5,739,308; 5,773,601; 5,886,165; 5,929,226; 5,977,296; 6,140,482; WO 00/56746; WO 01/14398, and related publications. Methods for synthesizing nucleic acids containing such analogs or derivatives are disclosed, for example, in the patent publications cited above and in U.S. Pat. Nos. 5,614,622; 5,739,314; 5,955,599; 5,962,674; 6,117,992; in WO 00/75372 and in related publications. In certain embodiments, analog nucleic acids include inosines, abasic sites, locked nucleic acids, minor groove binders, duplex stabilizers (e.g., acridine, spermidine) and/or other melting temperature modifiers (e.g., target nucleic acid, solid phase nucleic acid, and/or primer nucleic acid may comprise an analog).

[0256] The density of solid phase-bound primer molecules per solid support unit (e.g., one bead or one sample location of a chip) can be selected. A maximum density can be selected that allows for hybridization of sample nucleic acid from the plant cultivar to solid phase-bound primers. In certain embodiments, solid phase-bound primer density per solid support unit (e.g., nucleic acid molecules per bead) is about 5 nucleic acids to about 10,000 nucleic acids per solid support. The density of the solid phase-bound primer per unit solid support in some embodiments can be about 5, 10, 15, 20, 25, 30, 35, 40, 45, 50, 55, 60, 65, 70, 75, 80, 85, 90, 95, 100, 200, 300, 400, 500, 600, 700, 800, 900, 1000, 2000, 3000, 4000, 5000, 6000, 7000, 8000, 9000 or 10000 nucleic acids per solid support. In certain embodiments the density of the solid phase-bound primer per unit solid support is about 1 to 1 (e.g., one molecule of solid phase nucleic acid to one bead).

[0257] In certain embodiments, the solid supports can include any number of primer species useful for carrying out the analysis methods provided herein. Solid supports having primers attached or otherwise attached thereto can be provided in any convenient form for contacting a sample nucleic acid from a plant cultivar, such as solid or liquid form, for example. In certain embodiments, a solid support can be provided in a liquid form optionally containing one or more other components, which include without limitation one or more buffers or salts. Solid supports of a collection can be provided in one container or can be distributed across multiple containers.

[0258] Solid supports can be provided in an array in certain embodiments, or instructions can be provided to arrange solid supports in an array on a substrate. The term “array” as used herein can refer to an arrangement of sample locations (for nucleic acid samples from plant cultivars) on a single two-dimensional solid support, or an arrangement of solid supports across a two-dimensional surface. An array can be of any convenient general shape (e.g., circular, oval, square, rectangular). An array can be referred to as an “X by Y array” for square or rectangular arrays, where the array includes X number of sample locations or solid supports in one dimension and Y number of sample locations or solid supports in a perpendicular dimension. An array can be symmetrical (e.g., a 16 by 16 array) or non-symmetrical (e.g., an 8 by 16 array). An array may include any convenient number of sample locations or solid supports in any suitable arrangement. For example, X or Y independently can be 1, 2, 3, 4, 5, 6, 7, 8, 9, 10, 11, 12, 13, 14, 15, 16, 17, 18, 19, 20, 21, 22, 23, 24, 25, 26, 27, 28, 29 or 30 in some embodiments.

[0259] An array can contain one solid support species or multiple solid support species from a collection. The array can be arranged on any substrate suitable for sequence analysis or manufacture processes described herein. Examples of substrates include without limitation flat substrates, filter substrates, wafer substrates, etched substrates, substrates having multiple wells or pits (e.g., microliter (about 1 microliter, 5, 10, 15, 20, 25, 30, 35, 40, 45, 50, 55, 60, 65, 70, 75, 80, 85, 90, 95, 100, 110, 120, 130, 140, 150, 160, 170, 180, 190, 200, 300, 400, 500, 600, 700, 800, 900 and up to about 999 microliter volume), nanoliter (1 nanoliter, 5, 10, 15, 20, 25, 30, 35, 40, 45, 50, 55, 60, 65, 70, 75, 80, 85, 90, 95, 100, 110, 120, 130, 140, 150, 160, 170, 180, 190, 200, 300, 400, 500, 600, 700, 800, 900 and up to about 999 nanoliter volume), picoliter (1 picoliter, 5, 10, 15, 20, 25, 30, 35, 40, 45, 50, 55, 60, 65, 70, 75, 80, 85, 90, 95, 100, 110, 120, 130, 140, 150, 160, 170, 180, 190, 200, 300, 400, 500, 600, 700, 800, 900 and up to about 999 picoliter volume) wells or pits; wells having filter bottoms), substrates having one or more channels, substrates having one or more electrodes, chips and the like, and combinations thereof. Wells or pits of multiple well and pit substrates can contain one or more solid support units (e.g., each unit being a single bead or particle). Substrates can include a suitable material for conducting sequence analysis or nucleic acid manufacture processes described herein, including without limitation, fiber (e.g., fiber filters), glass (e.g., glass surfaces, fiber optic surfaces), metal (e.g., steel, gold, silver, aluminum, silicon and copper; metal coating), plastic (e.g., polyethylene, polypropylene, polyamide, polyvinylidenedifluoride), silicon and the like. In certain embodiments, the array can be a microarray or a nanoarray. A “nanoarray,” often is an array in which solid support units are separated by about 0.1 nanometers to about 10 micrometers, for example from about 1 nanometer to about 1 micrometer (e.g. about 0.1 nanometers, 0.5, 1, 2, 3, 4, 5, 10, 20, 30, 40, 50, 60, 70, 80, 90, 100, 200, 300, 400, 500, 600, 700, 800, 900 nanometers, 1 micrometer, 2, 3, 4, 5, 6, 7, 8, 9, and up to about 10 micrometers). A “microarray” is an array in which solid support units are separated by more than 1 micrometer. The density of solid support units on arrays often is at least 100/cm², and can be 100/cm² to about 10,000/cm², 100/cm² to about 1,000/cm² or about 150, 200, 300, 400, 500, 600, 700, 800, 900, 1000, 2000, 3000, 4000, 5000, 6000, 7000, 8000, 9000 or 10000 solid support units/cm².

### Applications/Uses

[0260] The methods provided herein can provide an outcome indicative of one or more characteristics of a plant cultivar, including, but not limited to, a TPS gene profile, a terpene profile, a cannabinoid profile, a flavonoid profile, and the presence of a genetic variation in a TPS gene or paralog thereof.

[0261] This information in turn permits identifying and selecting plants of desired genotype or phenotype for agricultural, industrial or medicinal applications based on desired characteristics, such as lineage, resistance or affinity for an organism or condition, or therapeutic activity, and using the selected plants or portions or extracts thereof in methods provided herein, such as methods of breeding, methods of cultivating a crop, and methods of treatment.

[0262] The methods of preparing and/or analyzing nucleic acids provided herein, and the primers provided herein for such analysis, permit the identification and select for plants that contain the TPS gene(s) and/or variants of the gene(s) that have desirable characteristics such as desired terpene profiles, ratios of monoterpenes to sesquiterpenes, and/or terpenes that confer agronomic or pathogenesis-related traits (such as insect, pest, mold, mildew, fungus, bacterial, or environmental resistance, as well as attract certain predator or beneficial organisms). The selection can, in embodiments, be used to identify desired parental lines for breeding daughter cultivars that contain desired combinations of these TPS genes or variants of these genes. In addition, the primers provided herein can be used to identify offspring/daughter cultivars that contain the desired gene(s)/variants of these gene(s) from one or both parent cultivars. In addition, the methods of preparing and/or analyzing nucleic acids provided herein, and the primers provided herein for such analysis, can be used for lineage-specific analysis to identify related and distant cultivars to in-breed or out-cross plant cultivars, such as Cannabis cultivars, based on the genetic profiling of unique subsequences (e.g., exons) of TPS genes. Other applications include, but are not limited to:
[0263] (1) Using the TPS gene-specific primers provided herein to increase or decrease terpene production, concentration and bio-accumulation in a plant cultivar, such as Cannabis, including, but not limited to the following terpenes:
[0264] α-Bisabolol, endo-Borneol, Camphene, Camphor, 3-Carene, Caryophyllene, Caryophyllene Oxide, α-Cedrene, Cedrol, Citronellol, Eucalyptol (1,8 Cineole), α-Farnesene, β-Farnesene, Fenchol, Fenchone, Geraniol, Geranyl Acetate, Guaiol, Humulene, Isoborneol, Isopulegol, D-Limonene, Linalool, Menthol, β-Myrcene, Nerol, trans-Nerolidol, cis-Nerolidol, trans-Ocimene, cis-Ocimene, α-Phellandrene, Phytol 1, Phytol 2, α-Pinene, β-Pinene, Pulegone, Sabinene, Sabinene Hydrate, α-Terpinene, γ-Terpinene, α-Terpineol, Terpinolene, Valencene, γ-Elemene, Z-Ocimene, E-Ocimene, α-Thujone, Thujene, γ-Muurolene, 2-Norpinene, α-Santalene, α-Selinene, Germacrene D, Eudesma-3,7(11)-diene, δ-Cadinol, trans-α-Beramotene, trans-2-pinanol, p-cymen-8-ol, Sativene, Cyclosativene, α-guaiene, γ-gurjunene, α-bulnesene, Bulnesol, α-eudesmol, β-eudesmol, Hedycaryol, γ-eudesmol, Alloaromadendrene, p-cymene, α-Copaene, β-Elemene, α-Cubebene, Linalyl acetate, Bornyl acetate, Heptacosane, Tricosane, S-Limonene, (−)-Thujopsene, Hashenene 5,5-dimethyl-1-vinylbicyclo[2.1.1]hexane, (−)-englerin A, Artemisinin
[0265] (2) Identify more or less active variants of terpene synthase genes for transgenic experiments including CRISPR, Cre-Lox, and other genetic modification applications to transfer the more or less active variant to another Cannabis cultivar via breeding methods strategies while using the primers provided herein to track the inheritance of that gene variant.
[0266] (3) Identify the sub-cellular localization of the TPS genes through identifying the amplicons generated in the methods provided.
[0267] (4) Selecting for terpene genes with tissue-specific expression behavior, such as root, flower, stem, or leaf specific terpene synthase genes.
[0268] (5) Using the TPS gene-specific primers provided herein in a microassay based presence/absence variation (PAV) identification screening tool, to identify the presence or absence of a TPS gene, including whether a genetic variant is present. In embodiments, a panel of information about several or all TPS genes in a plant cultivar can be obtained, and this information can be related to overall terpene production and accumulation in the plant cultivar.
[0269] (6) Using the TPS gene-specific primers provided herein in a cDNA microassay based expression screening tool to identify the level of expression of each gene in the TPS family of a plant cultivar and, in embodiments, relating the level of expression of this panel of genes to overall terpene production and accumulation.
[0270] (7) Using the TPS gene-specific primers provided herein to identify and select for gene variants of monoterpene synthases that would deplete the pre-cursor pool of GPP to lower overall cannabinoid and flavonoid concentrations and, in embodiments, breeding these genes into a higher cannabinoid producing cultivar to lower overall cannabinoid content.
[0271] (8) Using the TPS gene-specific primers provided herein to identify gene variants of monoterpene synthases that would deplete the pre-cursor pool of GPP to raise the overall cannabinoid and flavinoid concentrations and, in embodiments, breeding this genetic profile into another low cannabinoid producing cultivar to higher overall cannabinoid content using these molecular markers.
[0272] (9) Using the TPS gene-specific primers provided herein to select TPS gene combinations that provide specific terpene concentration/production profiles in plants of varying cannabinoid concentration, to decrease the cytotoxicity of the plant extract for medicinal application.
[0273] (10) Using the TPS gene-specific primers provided herein, select TPS gene variants that are linked to higher or lower cannabinoid producing cultivars.

[0274] In certain aspects, the TPS gene-specific primers provided herein, or subsets thereof, can be used, e.g., in genetic testing and/or amplicon sequencing, to identify plants having a TPS gene profile, TPS gene expression profile, one or more TPS gene variants, a terpene profile, a cannabinoid profile, a flavonoid profile or other characteristics or combinations thereof that impart certain properties to the plant including, but not limited to: pathogen resistance (e.g., insect resistance, fungus resistance), adaptability to regional geographic or environmental features that would make the plant less prone to diseases or predators in a certain region or environment (e.g., resistant to certain diseases or predators at the humidity level in the environment in which the plant is grown), or a desired medicinal use or medical effect. In certain embodiments, the medicinal uses/medical effects are selected from among one or more of antioxidant, anti-inflammatory, antibacterial, antiviral, anti-anxiety, antinociceptive, analgesic, antihypertensive, sedative, antidepressant, acetylcholine esterase inhibition (AChEI), neuro-protective and gastro-protective effects. In embodiments, at least one therapeutic effect is AChEI and in certain embodiments, the analytes are terpenes and the terpenes that are scored include one or more terpenes selected from among alpha pinene, eucalyptol, 3 carene, alpha terpinene, gamma terpinene, cis ocimene, trans ocimene and beta caryophyllene oxide. In certain embodiments, at least one therapeutic effect is analgesic and in embodiments, the analytes are terpenes and the terpenes that are scored comprise one or more terpenes selected from among alpha bisabolol, alpha terpineol, alpha phellandrene and nerolidol.

[0275] For example, subsets of these primers can be applied in various specific tests to classify a strain's effect on its user through genetic testing and/or amplicon sequencing. In aspects, sets of between 1-50, 1-45, 1-40, 1-35, 1-30, 1-25, 1-20, 1-15, 1-10, 1-5, 1-4, 1-3, 2 or 1 TPS genes, or 1, 2, 3, 4, 5, 6, 7, 8, 9, 10, 11, 12, 13, 14, 15, 16, 17, 18, 19, 20, 21, 22, 23, 24, 25, 26, 27, 28, 29, 30, 31, 32, 33, 34, 35, 36, 37, 38, 39, 40, 41, 42, 43, 44, 45, 46, 47, 48, 49, 50, 51, 52, 53, 54, 55, 56, 57, 58, 59, 60 or more, up to 100 or more TPS genes can be assigned as imparting one or more desired property to a plant cultivar. For example, sets of 1-10 TPS genes, when present in a Cannabis cultivar, can be characterized as involved in a specific feeling achieved from administration, e.g., by inhalation or ingestion of a product derived from the Cannabis cultivar. For example, the primers could be used for exon-specific genotyping on genomic DNA for a specific subset of genes to identify genotypes that lead to a change in the presence or level of certain terpenes that are known to be associated with medical/physiological effects such as energy, sedation, mental clarity, mental and physical impairments, appetite stimulation or suppression, and/or the other common effects that are associated with products derived from Cannabis or other plant cultivars, or that are known to be associated with pathogen resistance in a Cannabis or other plant cultivar. In aspects, the TPS genes or portions thereof identified by the methods provided herein and used in the methods provided herein include any TPS gene or combinations of TPS genes that produce one or more of: one or more terpenes selected from among α-Bisabolol, endo-Borneol, Camphene, Camphor, 3-Carene, Caryophyllene, Caryophyllene Oxide, α-Cedrene, Cedrol, Citronellol, Eucalyptol (1,8 Cineole), α-Farnesene, β-Farnesene, Fenchol, Fenchone, Geraniol, Geranyl Acetate, Guaiol, Humulene, Isoborneol, Isopulegol, D-Limonene, Linalool, Menthol, β-Myrcene, Nerol, trans-Nerolidol, cis-Nerolidol, trans-Ocimene, cis-Ocimene, α-Phellandrene, Phytol 1, Phytol 2, α-Pinene, β-Pinene, Pulegone, Sabinene, Sabinene Hydrate, α-Terpinene, γ-Terpinene, α-Terpineol, Terpinolene, Valencene, γ-Elemene, Z-Ocimene, E-Ocimene, α-Thujone, Thujene, γ-Muurolene, 2-Norpinene, α-Santalene, α-Selinene, Germacrene D, Eudesma-3,7(11)-diene, δ-Cadinol, trans-α-Beramotene, trans-2-pinanol, p-cymen-8-ol, Sativene, Cyclosativene, α-guaiene, γ-gurjunene, α-bulnesene, Bulnesol, α-eudesmol, β-eudesmol, Hedycaryol, γ-eudesmol, Alloaromadendrene, p-cymene, α-Copaene, β-Elemene, α-Cubebene, Linalyl acetate, Bornyl acetate, Heptacosane, Tricosane, S-Limonene, (−)-Thujopsene, Hashenene 5,5-dimethyl-1-vinylbicyclo[2.1.1]hexane, (−)-englerin A and Artemisinin.

[0276] Examples of such breeding methods for a plant cultivar include, but are not limited to those described below (TPS gene nomenclature is characterized in part in Allen et al, PLOS ONE, 14(9):e0222363 (2019), the contents of which are expressly incorporated in their entirety by reference herein):
[0277] (a)—A method of breeding a plant that would produce a non-volatile extract to preserve the smell, taste, and aroma of the plant material or an extract thereof by selecting parent cultivars to breed offspring expressing terpene synthase genes that provide such properties, e.g., one or more of the genes designated as follows, or genes that are similar thereto in sequence, structure and/or function, and/or products thereof:
   [0278] Sesquiterpene Synthases, aka “TPS-a” gene list. Examples include:
      [0279] TPS4-like
      [0280] TPS9-like1
      [0281] TPS9-like2
      [0282] TPS50
      [0283] TPS18
      [0284] TPS14
      [0285] TPS7
      [0286] TPS4
      [0287] TPS32
      [0288] TPS9
      [0289] TPS20
      [0290] TPS8-like
      [0291] TPS8
      [0292] TPS23
      [0293] TPS44
      [0294] TPS59
      [0295] TPS55
      [0296] TPS58
      [0297] TPS69

[0298] For example, TPS4-likeJL, TPS9-like1JL, TPS9-like2JL, TPS50JL, TPS18JL, TPS14JL, TPS7JL, TPS4JL, TPS32JL, TPS9JL, TPS20JL, TPS8-likeJL, TPS8JL, TPS23JL, TPS44JL, TPS59JL, TPS55JL, TPS58JL, TPS69JL.
[0299] (b)—A method of breeding a plant that would produce a volatile smell profile to produce an aromatic and fragrant extract and/or have anti-pathogenic properties by selecting parent cultivars to breed offspring expressing terpene synthase genes that provide such properties, e.g., one or more of the genes designated as follows, or genes that are similar thereto in sequence, structure and/or function, and/or products thereof:
   [0300] Monoterpene Synthases, aka “TPS-b” gene list. Examples include:
      [0301] TPS13-like2
      [0302] TPS13
      [0303] TPS17
      [0304] TPS30
      [0305] TPS64
      [0306] TPS6-like
      [0307] TPS6
      [0308] TPS11-like
      [0309] TPS51
      [0310] TPS30-like
      [0311] TPS3
      [0312] TPS52
      [0313] TPS5
      [0314] TPS13-like1
      [0315] TPS42
      [0316] TPS1
      [0317] TPS53
      [0318] TPS12
      [0319] TPS40
      [0320] TPS63
      [0321] TPS33
      [0322] TPS61
      [0323] TPS12-like
      [0324] TPS62
      [0325] TPS2
      [0326] TPS43
      [0327] TPS11
      [0328] TPS38
      [0329] TPS36
      [0330] TPS37

[0331] For example, TPS13-like2JL, TPS13JL, TPS17JL, TPS30JL, TPS64JL, TPS6-likeJL, TPS6JL, TPS11-likeJL, TPS51JL, TPS30-likeJL, TPS3JL, TPS52JL, TPS5JL, TPS13-like1JL, TPS42JL, TPS1JL, TPS53JL, TPS12JL, TPS40JL, TPS63JL, TPS33JL, TPS61JL, TPS12-likeJL, TPS62JL, TPS2JL, TPS43JL, TPS11JL, TPS38JL, TPS36JL, TPS37JL.
[0332] (c)—A method of breeding a plant for the absence of one or more monoterpene synthase (TPS-b) genes that use GPP as a precursor to allow for greater cannabinoid production by selecting parent cultivars to breed to breed offspring not expressing or having reduced expression of terpene synthase genes that interfere with cannabinoid production, e.g., one or more of the genes listed in (b) above, or genes that are similar thereto in sequence, structure and/or function, and/or products thereof.
[0333] (d)—A method of breeding a plant that would contain one or more root specifically expressed terpene synthases to increase resistance against pests in the soil and/or respond favorably to beneficial microorganisms in the soil such as beneficial insects, mycorrhizal fungi and beneficial bacteria by selecting parent cultivars to breed offspring expressing terpene synthase genes and/or products that provide such properties, e.g., one or more of the genes designated as follows, or genes that are similar thereto in sequence, structure and/or function, and/or products thereof:
   [0334] TPS11
   [0335] TPS49
   [0336] TPS41
   [0337] TPS12
   [0338] TPS11-like
   [0339] TPS36
   [0340] TPS6
   [0341] TPS37
   [0342] TPS64

[0343] For example, TPS11JL, TPS49JL, TPS41JL, TPS12JL, TPS11-likeJL, TPS36JL, TPS6JL, TPS37JL, TPS64JL.
[0344] (e)—A method of breeding a plant that would contain one or more predominantly stem specifically expressed terpene synthases to increase resistance against pests that are stem-hosted, e.g., stem-hosted insects, by selecting parent cultivars to breed offspring expressing terpene synthase genes and/or products that provide such properties, e.g., one or more of the one or more of the genes designated as follows, or genes that are similar thereto in sequence, structure and/or function, and/or products thereof:
   [0345] TPS63
   [0346] TPS43
   [0347] TPS6-like
   [0348] TPS33
   [0349] TPS24

[0350] For example, TPS63JL, TPS43JL, TPS41JL, TPS6-likeJL, TPS33JL, TPS24JL.

[0351] The methods listed in (f) through (r) below are for the production of desired terpene product profiles for the indicated applications. Examples of enzymes that can generate all or part of the terpene product profiles for Cannabis are listed (“cs” TPS enzymes). It is understood that one of skill in the art can identify, for any given plant cultivar, TPS enzymes that are similar in sequence, structure and/or function as the indicated Cannabis TPS enzymes and can obtain specialized cultivars having similar terpene product profiles.
[0352] (f)—A method of breeding a plant for terpene dominance that changes the smell and/or therapeutic/physiologic effect In the methods listed in (f) through (r) below, it is understood that TPS enzymes that are similar in function to the indicated “Cs” (Cannabis Sativa) enzymes
[0353] (f)—A method of breeding a plant for terpene dominance that changes the smell and/or therapeutic/physiologic effect of the plant and/or extract thereof, by selecting parent cultivars to breed offspring expressing terpene synthase genes and/or products that provide such properties, e.g., one or more of the following genes and/or products:

| | Terpene Product to |
|---|---|
| Genes: Major Product (Minor Product) | Breed For: |
| CsTPS9FN | β-caryophyllene |
| CsTPS3FN, csTPS5PK, csTPS5FN, csTPS15CT, | Myrcene |
| csTPS17AK, csTPS23Choc, csTPS30PK | |
| (csTPS32PK, csTPS7PK, csTPS1SK, csTPS2SK) | |
| CsTPS31PK, csTPS37FN (csTPS32PK, | Terpinolene |
| csTPS24Choc, csTPS1SK) | |
| csTPS1SK, csTPS14CT (csTPS5FN, csTPS5PK, | Limonene |
| csTPS7FN, csTPS23Choc, csTPS30PK, | |
| csTPS32PK) | |
| CsTPS25LS (CsTPS32PK) | β-Farnescene |
| csTPS2SK (csTPS1SK, csTPS5FN, csTPS30PK) | Alpha-Pinene |

[0354] (g)—A method of breeding a plant for producing an energetic effect when the plant or an extract thereof is ingested and/or vaporized (e.g., as a spray or for inhalation), by selecting parent cultivars to breed offspring expressing or not expressing terpene synthase genes and/or products that result in such properties, e.g., presence or lack thereof of one or more of the following genes and/or products:

| | Terpene Product to |
|---|---|
| Genes: Major Product (Minor Product) | Breed For: |
| CsTPS18VF (CsTPS19BL) | S-linalool |
| CsTPS31PK, csTPS37FN (csTPS32PK, | Terpinolene |
| csTPS24Choc, csTPS1SK) | |
| csTPS6PK, csTPS13PK, and csTPS38FN | β-Ocimene |
| (csTPS7AK) | |
| CsTPS2FN, csTPS5FN (CsTPS32PK | α-Pinene >> β-pinene |
| CsTPS18Choc (CsTPS19BL) | Lack of R-linalool |
| (csTPS5PK, csTPS17AK, csTPS31PK, | Lack of α-terpineol |
| csTPS32PK) | |
| | Lack of fenchol |

[0355] (h)—A method of breeding a plant for producing a sedative effect when the plant or an extract thereof is ingested and/or vaporized (e.g., as a spray or for inhalation), by selecting parent cultivars to breed offspring expressing or not expressing terpene synthase genes and/or products that result in such properties, e.g., presence or lack thereof of one or more of the following genes and/or products:

| | Terpene Product to |
|---|---|
| Genes: Major Product (Minor Product) | Breed For: |
| CsTPS31PK, csTPS2SK (csTPS1SK, | β-pinene = α-Pinene |
| csTPS5FN, csTPS5PK, csTPS30PK) | (equal amounts) |
| CsTPS18Choc (CsTPS19BL) | R-linalool |
| csTPS1SK, csTPS14CT (csTPS5FN, | Limonene |
| csTPS5PK, csTPS7FN, csTPS23Choc, | |
| csTPS30PK, csTPS32PK) | |
| csTPS18VF, csTPS19BL, csTPS35LS | Trans-nerolidol |
| (csTPS22PK, csTPS25LS, csTPS32PK) | |
| (csTPS5PK, csTPS17AK, csTPS31PK, | Terpineol |
| csTPS32PK) | |
| CsTPS32PK | Camphene |
| csTPS6PK, csTPS13PK, and | Lack of β-ocimene |
| csTPS38FN (csTPS7AK) | |
| CsTPS18VF (CsTPS19BL) | Lack of S-Linalool |
| CsTPS31PK, csTPS37FN (csTPS32PK, | Lack of Terpinolene |
| csTPS24Choc, csTPS1SK) | |

[0356] (i)—A method of breeding a plant that would produce a cognitive-enhancing effect when the plant, or extract thereof, is ingested and/or vaporized by selecting parent cultivars to breed offspring expressing terpene synthase genes and/or products that provide such properties, e.g., one or more of the following genes and/or products:

| | Terpene Product to |
|---|---|
| Genes: Major Product (Minor Product) | Breed For: |
| csTPS2FN, csTPS5FN, and csTPS32PK | α-Pinene >> β-pinene |
| csTPS6PK, csTPS13PK, and | β-ocimene |
| csTPS38FN (csTPS7AK) | |
| | Eucalyptol |

[0357] (j)—A method of breeding a plant that would produce an appetite-suppressing effect when the plant, or extract thereof, is ingested and/or vaporized by selecting parent cultivars to breed offspring expressing terpene synthase genes and/or products that provide such properties, e.g., one or more of the following genes and/or products:

| | Terpene Product to |
|---|---|
| Genes: Major Product (Minor Product) | Breed For: |
| CsTPS9FN (csTPS4FN, csTPS22PK) | Humulene |

[0358] (k)—A method of breeding a plant that would produce an anti-inflammatory effect when the plant, or extract thereof, is ingested and/or vaporized by selecting parent cultivars to breed offspring expressing terpene synthase genes and/or products that provide such properties, e.g., one or more of the following genes and/or products:

| | Terpene Product to |
|---|---|
| Genes: Major Product (Minor Product) | Breed For: |
| csTPS2SK (csTPS1SK, csTPS5FN, csTPS30PK) | α-Pinene |
| CsTPS9FN (csTPS4FN, csTPS22PK) | Humulene |
| CsTPS9FN | β-caryophyllene |

[0359] (l)—A method of breeding a plant that would produce an anxiolytic (anti-anxiety) effect when the plant, or extract thereof, is ingested and/or vaporized by selecting parent cultivars to breed offspring expressing terpene synthase genes and/or products that provide such properties, e.g., one or more of the following genes and/or products:

| | Terpene Product to |
|---|---|
| Genes: Major Product (Minor Product) | Breed For: |
| csTPS2SK (csTPS1SK, csTPS5FN, csTPS30PK) | α-Pinene |
| CsTPS9FN (csTPS4FN, csTPS22PK) | Humulene |
| CsTPS9FN | β-caryophyllene |
| csTPS17AK, csTPS18VF, csTPS18Choc, | Linalool |
| csTPS19BL, csTPS29BC, csTPS35LS | |
| (csTPS31PK) | |
| csTPS18VF, csTPS19BL, csTPS35LS | Nerolidol |
| (csTPS22PK, csTPS25LS, csTPS32PK) | |
| csTPS1SK, csTPS14CT (csTPS5FN, csTPS5PK, | Limonene |
| csTPS7FN, csTPS23Choc, csTPS30PK, | |
| csTPS32PK) | |

[0360] (m)—A method of breeding a plant that would produce an antinociceptive effect when the plant, or extract thereof, is ingested and/or vaporized by selecting parent cultivars to breed offspring expressing terpene synthase genes and/or products that provide such properties, e.g., one or more of the following genes and/or products:

| | Terpene Product to |
|---|---|
| Genes: Major Product (Minor Products | Breed For: |
| csTPS5PK (csTPS31PK, csTPS32PK) | α-bisabolol |
| (csTPS5PK, csTPS17AK, csTPS31PK, | α -terpineol |
| csTPS32PK) | |
| csTPS18VF, csTPS19BL, csTPS35LS | trans nerolidol |
| (csTPS22PK, csTPS25LS, csTPS32PK) | |
| (CsTPS2SK, csTPS32PK) | α-phellandrene |
| | Eucalyptol |

[0361] (n)—A method of breeding a plant that would produce a body relaxing effect when the plant, or extract thereof, is ingested and/or vaporized by selecting parent cultivars to breed offspring expressing terpene synthase genes and/or products that provide such properties, e.g., one or more of the following genes and/or products:

| Genes: Major Product (Minor Product) | Terpene Product to Breed For: |
|---|---|
| csTPS5PK (csTPS31PK, csTPS32PK) | α-bisabolol |
| (csTPS5PK, csTPS17AK, csTPS31PK, | α -terpineol |
| csTPS32PK) | |
| csTPS18VF, csTPS19BL, csTPS35LS | trans nerolidol |
| (csTPS22PK, csTPS25LS, csTPS32PK) | |
| (csTPS2SK, csTPS32PK) | α-phellandrene |

[0362] (o)—A method of breeding a plant that would produce an anti-depressant effect when the plant, or extract thereof, is ingested and/or vaporized by selecting parent cultivars to breed offspring expressing terpene synthase genes and/or products that provide such properties, e.g., one or more of the following genes and/or products:

| Genes: Major Product (Minor Product) | Terpene Product to Breed For: |
|---|---|
| CsTPS31PK, csTPS2SK (csTPSISK, | b-pinene = a-Pinene |
| csTPS5FN, csTPS5PK, csTPS30PK) | |
| csTPS1SK, csTPS14CT (csTPS5FN, | Limonene |
| csTPS5PK, csTPS7FN, csTPS23Choc, | |
| csTPS30PK, csTPS32PK) | |
| csTPS18VF, csTPS19BL, csTPS35LS | nerolidol |
| (csTPS22PK, csTPS25LS, csTPS32PK) | |
| csTPS17AK, csTPS18VF, csTPS18Choc, | Linalool |
| csTPS19BL, csTPS29BC, csTPS35LS | |
| (csTPS31PK) | |

[0363] (p)—A method of breeding a plant that contains acetyl cholinesterase-inhibitor (AChEI) terpenes by selecting parent cultivars to breed offspring expressing terpene synthase genes and/or products that provide such properties, e.g., one or more of the following genes and/or products:

| Genes: Major Product (Minor Product) | Terpene Product to Breed For: |
|---|---|
| csTPS2SK (csTPS1SK, csTPS5FN, | α-pinene |
| csTPS30PK) | |
| CsTPS31PK, csTPS37FN (csTPS32PK, | Terpinolene |
| csTPS24Choc, csTPSISK) | |
| csTPS6PK, csTPS13PK, and csTPS38FN | β-ocimene |
| (csTPS7AK) | |
| | 3-Carene |
| csTPS33PK | α- and γ-terpinene |
| (csTPS5FN, csTPS7FN, csTPS30PK) | Sabinene |

[0364] (q)—A method of breeding a plant that contain one or more of the Herbivore-induced Plant Volatiles (HIPV) terpene synthases (see, e.g., Booth et al., Plant Physiol., 184(1):130-147 (2020), the contents of which are incorporated in their entirety by reference herein), by selecting parent cultivars to breed offspring expressing terpene synthase genes and/or products that provide such properties, e.g., one or more of the following genes and/or products:

| Genes: Major Product (Minor Product) | Terpene Product to Breed For: |
|---|---|
| csTPS6PK, csTPS13PK, csTPS38FN | Ocimene |
| (csTPS7AK) | |
| csTPS17AK, csTPS18VF, csTPS18Choc, | Linalool |
| csTPS19BL, csTPS29BC, csTPS35LS | |
| (csTPS31PK) | |
| csTPS5PK (csTPS31PK, csTPS32PK) | Bisabolol |
| csTPS18VF, csTPS19BL, csTPS35LS | Nerolidol |
| (csTPS22PK, csTPS25LS, csTPS32PK) | |
| csTPS2SK (csTPS1SK, csTPS5FN, | α-pinene |
| csTPS30PK) | |
| (csTPS2SK, csTPS1SK, csTPS5FN, | β-pinene |
| csTPS5PK, csTPS30PK) | |
| csTPS1SK, csTPS14CT (csTPS5FN, | Limonene |
| csTPS5PK, csTPS7FN, csTPS23Choc, | |
| csTPS30PK, csTPS32PK) | |
| (csTPS5PK, csTPS17AK, csTPS31PK, | α-terpineol |
| csTPS32PK) | |
| (csTPS5PK, csTPS17AK, csTPS31PK, | Y-elemene |
| csTPS32PK) | |
| (csTPS5PK, csTPS31PK, csTPS32PK) | Bergamotene |
| (csTPS8FN, csTPS16CC, csTPS22PK, | Eudesmol |
| csTPS28PK) | |
| csTPS16CC | Germacrene B |
| N/A | Guiaol |
| (csTPS5PK, csTPS17AK, csTPS31PK, | Fenchol |
| csTPS32PK) | |
| N/A | Eugenol |

[0365] (r)—A method of breeding a plant that produces, in the plant or in an extract thereof, one or more of the following properties by selecting parent cultivars to breed offspring expressing terpene synthase genes and/or products that provide such properties, e.g., one or more of the following genes and/or gene products:

### Antibacterial Properties:

| Genes: Major Product (Minor Product) | Terpene Product to Breed For: |
|---|---|
| CsTPS4FN | Aromadendrene |
| | Carvacrol |
| csTPS9FN | β-Caryophyllene |
| TPS-b and/or other | Eucalyptol (1,8-Cineole) |
| TPS-b and/or other | Fenchol |
| csTPS16CC | Germacrene D |
| CsTPS32PK (CsTPS17AK) | Nerol (cis-Geraniol) |
| TPS-b and/or other | Pulegone |
| (csTPS5FN, csTPS7FN, csTPS30PK) | Sabinene |
| CsTPS32PK (CsTPS17AK) | Geraniol |

### Antimicrobial Properties:

| Genes: Major Product (Minor Product) | Terpene Product to Breed For: |
|---|---|
| (CsTPS32PK) | Camphor |
| (csTPS30PK, CsTPS7FN) | Sabinene Hydrate |
| csTPS33PK | Thymol |

### Fungicidal Properties:

| Genes: Major Product (Minor Product) | Terpene Product to Breed For: |
|---|---|
| (CsTPS35PK) | Citronellol |
| csTPS33PK | para-Cymene |
| TPS-b and/or other | Pulegone |
| CsTPS32PK | Geraniol |

### Herbicidal Properties:

| Genes: Major Product (Minor Product) | Terpene Product to Breed For: |
|---|---|
| CsTPS32PK | Geraniol |
| TPS-b and/or other | Pulegone |
| (CsTPS35PK) | Citronellol |
| TPS-b and/or other | Borneol |
| csTPS33PK | para-Cymene |

### Pesticidal Properties:

| Genes: Major Product (Minor Product) | Terpene Product to Breed For: |
|---|---|
| CsTPS4FN - TPS9-like2JL, TPS4-likeJL | Aromadendrene |
| CsTPS5PK (CsTPS32PK - TPS5JL) | α-Bisabolol |
| TPS-a | Cedrol |
| CsTPS18VF, csTPS19BL, csTPS35LS, | Nerolidol |
| (csTPS22PK, csTPS25LS, csTPS32PK) | |
| CsTPS18VF, csTPS19BL, csTPS35LS, | trans-Nerolidol |
| (csTPS22PK, csTPS25LS, csTPS32PK) | |
| TPS-a | Guaiol |

Pheromone: Insect Attractant (e.g., for Pollination; to Attract Insects that are Predators of Other Insects or Other Pathogens that Cause Plant Damage)

| Genes: Major Product (Minor Product) | Terpene Product to Breed For: |
|---|---|
| | endo-Borneol |
| | Isoborneol |
| | 3-Carene |
| | Carveol |
| csTPS16CC | Germacrene B |
| CsTPS21AK | Hedycaryol |
| | Menthol |
| CsTPS18VF, csTPS19BL, csTPS35LS, | cis-Nerolidol |
| (csTPS22PK, csTPS25LS, csTPS32PK) | |
| CsTPS6FN, csTPS13PK, csTPS38FN, | cis-β-Ocimene |
| (csTPS17AK) | |
| CsTPS6FN, csTPS13PK, csTPS38FN, | trans-β-Ocimene |
| (csTPS17AK) | |
| (csTPS30PK, CsTPS7FN) | Sabinene Hydrate |
| csTPS33PK | α-Terpinene |
| csTPS33PK | Thymol |
| CsTPS25LS (CsTPS32PK) | β-Farnesene |
| CsTPS25LS | α-Farnesene |
| CsTPS8FN, (csTPS16CC, csTPS22PK, | γ-Eudesmol |
| CsTPS28PK) | |
| CsTPS4FN | Alloaromadendrene |
| (CsTPS8FN, csTPS4FN) | Valencene |
| TPS-b and/or other | Pulegone |

### Expectorant Properties:

| Genes: Major Product (Minor Product) | Terpene Product to Breed For: |
|---|---|
| CsTPS32PK | Camphene |
| CsTPS32PK | Geraniol |
| (csTPS30PK, CsTPS7FN) | Sabinene Hydrate |

Non-Irritant Properties: (Breed for Reduced Production or Absence of, e.g., One or More of the Following Terpene Products that are Irritants, which can be Useful, e.g., when Breeding Plants Such as Cannabis for Dermatological Uses in Salves. Creams. Ointment and Transdermal Applications)

| Genes: Major Product | Terpene Product to Breed for |
|---|---|
| (Minor Product) | Absence/Reduced Amount: |
| TPS-b and/or other | Borneol |
| | α-Cedrene |
| (CsTPS35PK) | Citronellol |
| csTPS33PK | para-Cymene |
| | Fenchone (Presence - Counterirritant) |

[0372] The methods provided herein can, in certain aspects, be used to identify plant genotypes, e.g., Cannabis cultivar genotypes, that produce greater HIPV terpene concentrations in response to a pest or pathogen, or in response to one or more signals emitted by a companion Cannabis cultivar, or in response to one or more signals emitted by a plant cultivar of a species other than Cannabis. It is understood by those of skill in the art that when breeding for certain TPS genes, the presence of a certain gene does not mean that it will always be expressed or produce a measurable product in a flower until it is triggered to express such gene and/or produce a product that is a direct or indirect result of the expression of the gene. This includes, for example, the production of a higher concentration of one or more HIPV terpene concentrations when a threshold pest or pathogen pressure is applied, which then induces the expression of the one or more HIPV terpenes. In addition, variants of the TPS family can have a greater or lesser response to these pest or pathogen pressures, which can be identified by barcoding as provided herein, since the barcode of a TPS gene variant can be indicative of the greater or lesser expression response to a given pest or pathogen.

[0373] Similarly, the production of a higher concentration of one or more HIPV terpene concentrations in response to one or more external signals produced by one or more companion Cannabis plants or by one or more companion plants of a species other than Cannabis can be dependent on a threshold signal, which then induces the expression of the one or more HIPV terpenes. In addition, variants of the TPS family can have a greater or lesser response to these external signals, which can be identified by barcoding as provided herein, since the barcode of a TPS gene variant can be indicative of the greater or lesser expression response to a given pest. This also includes, for example, the production of a higher concentration of one or more HIPV terpene concentrations when one or more external signals from a companion Cannabis species or other species of plant is applied, which then induces the expression of the one or more HIPV terpenes. In addition, variants of the TPS family can have a greater or lesser response to these external signals, which can be identified by barcoding as provided herein, since the barcode of a TPS gene variant can be indicative of the greater or lesser expression response to an external signal from a companion plant.

[0374] In aspects, provided herein are methods of identifying plant cultivars containing terpene synthase gene profiles that result in the expression of terpenoids associated with oviposition deterrence (deter an insect that is a pest from laying eggs on the plant), fumigant insect repellent activity, contact toxicity and/or insect herbivore predator attractant. In certain aspects, the insect oviposition deterrent is selected from among one or more of linalool, α-bisabolol, and trans-neridol or any combinations thereof. In aspects, the contact insecticide is guaiol. In aspects, the fumigant insect repellent is selected from among β-ocimene, α-bisabolol or a combination thereof.

[0375] In certain aspects, provided herein are methods of breeding plants that produce terpenoids associated with oviposition deterrence, insect fumigant activity, contact toxicity and/or an insect herbivore predator attractant. In aspects, the breeding comprises creating a plant with an oviposition deterrence profile by crossing a plant that produces an amount of trans-nerolidiol that is at or above a threshold amount with a plant that produces an amount of α-bisabolol that is at or above a threshold amount. In aspects, the breeding comprises creating a plant with an insect fumigant terpene profile by crossing a plant that produces an amount of α-bisabolol that is at or above a threshold amount with a plant that produces β-ocimene in an amount that is at or above a threshold amount. In certain aspects, the breeding comprises creating a plant with both oviposition deterrence and insect fumigant terpene profiles by crossing a plant that produces an amount of α-bisabolol and β-ocimene that is at or above a threshold amount with a plant that produces trans-nerolidiol in an amount that is at or above a threshold amount.

[0376] In certain aspects, the methods provided herein can be used to amplify the entire coding sequence of a TPS gene for analyzing, e.g., its homology to other TPS gene sequences by sequencing and/or restriction digest analysis, its terpene production (e.g., in vitro) and/or for transgenic cloning to functionally characterize the gene and/or to create variant cultivars having a desired terpene synthase gene expression profile. For example, amplicons of a TPS gene can be generated using a forward primer closest to the 5′ end of the gene, and a reverse primer closest to the 3′ end of the gene that could amplify the full transcript gene sequence from a given plant cultivar's gDNA, or cDNA library. The resulting amplicons could be subject to any genotyping application such as HRM, sequencing, microarray analysis, restriction enzyme digestion, or other common genotyping methods.

[0377] In aspects, the TPS gene of interest can be inserted into a cloning vector for expression in a compatible host cell. A large number of vector-host systems known in the art can be used. Possible vectors include, but are not limited to, plasmids or modified viruses. Such vectors include, but are not limited to, bacteriophages such as lambda derivatives, or plasmids such as pCMV4, pBR322 or pUC plasmid derivatives or the Bluescript vector (Stratagene, La Jolla, CA). Other expression vectors include the HZ24 expression vector exemplified herein (see e.g., SEQ ID NOS:4 and 5). The insertion into a cloning vector can, for example, be accomplished by ligating the DNA fragment into a cloning vector which has complementary cohesive termini. Insertion can be effected using TOPO cloning vectors (Invitrogen, Carlsbad, CA). Prokaryotic and eukaryotic host cells can be used to express a gene contained in a vector. Such cells include bacterial cells, yeast cells, fungal cells, Archea, plant cells, insect cells and animal cells. These include but are not limited to mammalian cell systems infected with virus (e.g., vaccinia virus, adenovirus and other viruses); insect cell systems infected with virus (e.g., baculovirus); microorganisms such as yeast containing yeast vectors; or bacteria transformed with bacteriophage, DNA, plasmid DNA, or cosmid DNA.

[0378] The host cells are used to produce a protein encoded by the TPS gene or by a vector containing the gene by growing them under conditions whereby the encoded protein is expressed by the cell. The encoded TPS enzyme can be studied/manipulated in the host cell, or can be recovered from the cell by protein isolation and purification methods known to those of skill in the art. In aspects, the host-nucleic acid (vector or gene) system can be engineered, by methods known to those of skill in the art, to secrete the TPS enzyme into the medium.

[0379] In aspects, the TPS gene is involved in the production of terpinolene. In aspects, the primers are as shown below:

Terpinolene - csTPS37FN full mRNA cloning primers (including signal peptide sequences)

| | | | | | | | | Self | Self 3′ |
|---|---|---|---|---|---|---|---|---|---|
| | | Template | | | | | | complemen- | complemen- |
| | Sequence (5′->3′) | strand | Length | Start | Stop | Tm | GC % | tarity | tarity |
| Forward | ATGCAGTGCATGGCT | Plus | 19 | 1 | 19 | 57.17 | 47.37 | 9.00 | 0.00 |
| primer | TTTC (SEQ ID NO: 1328) | | | | | | | | |
| Reverse | TTACATGGGAATAGG | Minus | 30 | 1920 | 1891 | 58.38 | 30.00 | 5.00 | 3.00 |
| primer | GTTAATAATCAAATC | | | | | | | | |
| | (SEQ ID NO:1329) | | | | | | | | |
| Product | 1920 | | | | | | | | |
| length | | | | | | | | | |

[0380] In certain aspects, the TPS genes are selected from among the following: 1) TPS9 LPA4 type, 2) TPS9 LPA21.3 type, 3) TPS37 Cleaved (lacking the signal peptide, i.e., does not encode the chloroplast import signal), 4) TPS16CC, and 5) TPS20CT, and the primers are as follows:

Beta-Caryophyllene and Humulene - TPS9L21 (TPS9 LPA21.3)

| | | Template | | | | | | Self | Self 3′ |
|---|---|---|---|---|---|---|---|---|---|
| | Sequence (5'->3') | strand | Length | Start | Stop | Tm | GC % | complementarity | complementarity |
| Forward | AT GTC ATA TCA AGT | Plus | 20 | 1 | 20 | 48.75 | 30.00 | 5.00 | 2.00 |
| primer | TTT AGC (SEQ ID | | | | | | | | |
| | NO: 1330) | | | | | | | | |
| Reverse | TGG GAT TTG ATC | Minus | 23 | 1668 | 1646 | 53.76 | 34.78 | 4.00 | 2.00 |
| primer | TAT AAG TAA CG | | | | | | | | |
| | (SEQ ID NO: 1331) | | | | | | | | |
| Product | 1668 | | | | | | | | |
| length | | | | | | | | | |

Beta-Caryophyllene and Humulene - TPS9L4 (TPS9 LPA4)

| | | Template | | | | | | Self | Self 3′ |
|---|---|---|---|---|---|---|---|---|---|
| | Sequence (5′->3′) | strand | Length | Start | Stop | Tm | GC % | complementarity | complementarity |
| Forward | AT GTC ATA TCA AGT | Plus | 20 | 1 | 20 | 48.75 | 30.00 | 5.00 | 2.00 |
| primer | TTT AGC (SEQ ID | | | | | | | | |
| | NO: 1330) | | | | | | | | |
| Reverse | CGG GAT TTG ATC | Minus | 23 | 1668 | 1646 | 54.82 | 39.13 | 4.00 | 2.00 |
| primer | TAT AAG TAA CG (SEQ | | | | | | | | |
| | ID NO: 1332) | | | | | | | | |
| Product | 1668 | | | | | | | | |
| length | | | | | | | | | |

Germacrene B/gamma-eudesmol - TPS1600

| | | Template | | | | | | Self | Self 3′ |
|---|---|---|---|---|---|---|---|---|---|
| | Sequence (5′->3′) | strand | Length | Start | Stop | Tm | GC % | complementarity | complementarity |
| Forward | AT GTC TAG TCA AGT | Plus | 20 | 1 | 20 | 52.37 | 40.00 | 6.00 | 2.00 |
| primer | GTT AGC (SEQ ID | | | | | | | | |
| | NO: 1333) | | | | | | | | |
| Reverse | TAA TGG GAT GGG | Minus | 22 | 1713 | 1692 | 54.59 | 40.91 | 4.00 | 2.00 |
| primer | ATC TAT AAG C (SEQ | | | | | | | | |
| | ID NO: 1334) | | | | | | | | |
| Product | 1713 | | | | | | | | |
| length | | | | | | | | | |

Hedycaryol - CsTPS200T

| | | Template | | | | | | Self | Self 3′ |
|---|---|---|---|---|---|---|---|---|---|
| | Sequence (5′->3′) | strand | Length | Start | Stop | Tm | GC % | complementarity | complementarity |
| Forward | AT GTC AAA TAT TCA | Plus | 23 | 1 | 23 | 52.90 | 30.43 | 6.00 | 2.00 |
| primer | AGT CTT AGC | | | | | | | | |
| | (SEQ ID NO: 1335) | | | | | | | | |
| Reverse | TAA TGG GAT GGG | Minus | 26 | 1653 | 1628 | 55.68 | 30.77 | 7.00 | 0.00 |
| primer | ATC TAT AAG C (SEQ | | | | | | | | |
| | ID NO: 1336) | | | | | | | | |
| Product | 1653 | | | | | | | | |
| length | | | | | | | | | |

Terpinolene - csTPS37FN coding primers (cleaved; does not include signal peptide sequences)

| | | Template | | | | | | Self | Self 3′ |
|---|---|---|---|---|---|---|---|---|---|
| | Sequence (5′->3′) | strand | Length | Start | Stop | Tm | GC % | complementarity | complementarity |
| Forward | ACT GTG GTC GAT | Plus | 23 | 184 | 206 | 59.55 | 47.83 | 4.00 | 0.00 |
| primer | AAC CCT AGT TC | | | | | | | | |
| | (SEQ ID NO: 1337) | | | | | | | | |
| Reverse | CAT GGG AAT AGG | Minus | 27 | 1917 | 1891 | 56.63 | | 33.33 | 5.00 |
| primer | GTT AAT AAT CAA | | | | | | | | |
| | ATC (SEQ ID NO: | | | | | | | | |
| | 1338) | | | | | | | | |
| Product | 1734 | | | | | | | | |
| length | | | | | | | | | |

[0381] In embodiments, the above-mentioned primers can be adapted for use in commercial cloning, expression and/or amplification kits. For example, if a directional cloning/amplification/expression system is performed, such as TOPO directional cloning/amplification/expression (Thermofisher Scientific, USA), using one or more of the above-mentioned sets of primers, a 5′ CACC 3′ sequence can be attached on the 5′ end of any of the forward primera to allow for an overhang to be created during the process of PCR, which then allows for subsequent cloning/amplification/expression protocols to be carried out. In embodiments, the 5′CACC3′ tag can be interchanged with overhang sequences designated by kits other than the TOPO kit, to accomplish the same goal of functional characterization. In embodiments, introduction of an artificial start codon (ATG) at the 5′ end of a forward primer can permit the coding mRNA sequence to be expressed and properly folded in a bacterial or non-eukaryotic expression system. In embodiments, the ATG start codon is added to the 5′ end of the primer of SEQ ID NO:1337.

### Use of Devices, Programs and Media

[0382] In certain embodiments, an outcome and/or classification obtained by the methods provided herein is provided using a suitable visual medium (e.g., a component of a machine, e.g., a printer or display). A classification and/or outcome may be provided in the form of a report. A report typically includes a display of an outcome and/or classification (e.g., a value, one or more characteristics of a sample, an assessment or probability of presence or absence of a genotype, phenotype or genetic variation; and/or an assessment or probability of a genotype, genetic variation, and/or genetic variation signature, e.g., of a TPS gene profile for a plant cultivar), sometimes includes an associated confidence parameter, and sometimes includes a measure of performance for a test used to generate the outcome and/or classification. A report sometimes includes a recommendation for a follow-up test (e.g., a test that confirms the outcome or classification).

[0383] A report can be displayed in a suitable format that facilitates determination of presence or absence of a genotype, phenotype, genetic variation or genetic variation signature. Non-limiting examples of formats suitable for use for generating a report include digital data, a graph, a 2D graph, a 3D graph, and 4D graph, a picture (e.g., a jpg, bitmap (e.g., bmp), pdf, tiff, gif, raw, png, the like or suitable format), a pictograph, a chart, a table, a bar graph, a pie graph, a diagram, a flow chart, a scatter plot, a map, a histogram, a density chart, a function graph, a circuit diagram, a block diagram, a bubble map, a constellation diagram, a contour diagram, a cartogram, spider chart, Venn diagram, nomogram, and the like, or combination of the foregoing. In embodiments, the report can be in the form of a barcode, where each line/number in the barcode represents a TPS gene or paralog thereof that is present in the plant cultivar.

[0384] A report can be generated by a computer and/or by human data entry, and can be transmitted and communicated using a suitable electronic medium (e.g., via the internet, via computer, via facsimile, from one network location to another location at the same or different physical sites), or by another method of sending or receiving data (e.g., mail service, courier service and the like). Non-limiting examples of communication media for transmitting a report include auditory file, computer readable file (e.g., pdf file), paper file, laboratory file, or any other medium described in the previous paragraph. A laboratory file may be in tangible form or electronic form (e.g., computer readable form), in certain embodiments. After a report is generated and transmitted, a report can be received by obtaining, via a suitable communication medium, a written and/or graphical representation of an outcome and/or classification, which upon review allows a qualified individual to make a determination as to one or more characteristics of a sample from a plant cultivar, such as the presence or absence of a genotype, phenotype or genetic variation in a test sample (e.g., a Cannabis plant sample).

[0385] An outcome and/or classification can be provided by and obtained from a laboratory (e.g., obtained from a laboratory file). A laboratory file can be generated by a laboratory that carries out one or more tests for determining one or more characteristics of a sample such as presence or absence of a genotype, phenotype or genetic variation for a test sample (e.g., a Cannabis plant sample). Laboratory personnel (e.g., a laboratory manager) can analyze information associated with test samples (e.g., test profiles, reference profiles, test values, reference values, level of deviation) underlying an outcome and/or classification. For calls pertaining to presence or absence of a genotype, phenotype or genetic variation that are close or questionable, laboratory personnel can re-run the same procedure using the same (e.g., aliquot of the same sample) or different test sample from a plant.

[0386] A laboratory can be in the same location or different location (e.g., in another town, city or country) as personnel assessing the presence or absence of a genotype, phenotype or genetic variation from the laboratory file. For example, a laboratory file can be generated in one location and transmitted to another location in which the information for a test sample therein is assessed by a qualified individual, and optionally, transmitted to the facility and/or grower from which the test sample was obtained. A laboratory sometimes generates and/or transmits a laboratory report containing a classification of presence or absence of a genotype, phenotype or a genetic variation for a test sample (e.g., a Cannabis plant sample).

### Machines, Software and Interfaces

[0387] Methods described herein (e.g., processing amplification results, processing high resolution melting (HRM) assay results, processing sequence read data, determining one or more characteristics of a plant cultivar based on sequence read data, associating one or more phenotypes of a plant cultivar (e.g., terpene, cannabinoid or flavonoid production profiles with one or more genotypes or genetic variants of the plant cultivar, and/or providing an outcome (e.g., indicated as desirable for breeding, or cultivating as a crop, or for therapeutic use, based on the specified selection criteria) can be computer-implemented methods, and one or more portions of a method sometimes are performed by one or more processors (e.g., microprocessors), computers, systems, apparatuses, or machines (e.g., microprocessor-controlled machine).

[0388] Computers, systems, apparatuses, machines and computer program products suitable for use often include, or are utilized in conjunction with, computer readable storage media. Non-limiting examples of computer readable storage media include memory, hard disk, CD-ROM, flash memory device and the like. Computer readable storage media generally are computer hardware, and often are non-transitory computer-readable storage media. Computer readable storage media are not computer readable transmission media, the latter of which are transmission signals per se.

[0389] Provided herein are computer readable storage media with an executable program stored thereon, where the program instructs a microprocessor to perform a method described herein. Provided also are computer readable storage media with an executable program module stored thereon, where the program module instructs a microprocessor to perform part of a method described herein. Also provided herein are systems, machines, apparatuses and computer program products that include computer readable storage media with an executable program stored thereon, where the program instructs a microprocessor to perform a method described herein. Provided also are systems, machines and apparatuses that include computer readable storage media with an executable program module stored thereon, where the program module instructs a microprocessor to perform part of a method described herein.

[0390] Also provided are computer program products. A computer program product often includes a computer usable medium that includes a computer readable program code embodied therein, the computer readable program code adapted for being executed to implement a method or part of a method described herein. Computer usable media and readable program code are not transmission media (i.e., transmission signals per se). Computer readable program code often is adapted for being executed by a processor, computer, system, apparatus, or machine.

[0391] In some embodiments, methods described herein (e.g., processing amplification results, processing high resolution melting (HRM) assay results, processing sequence read data, determining one or more characteristics of a plant cultivar based on sequence read data, associating one or more phenotypes of a plant cultivar (e.g., a Cannabis plant) with one or more genotypes or genetic variations for the plant cultivar and/or providing an outcome are performed by automated methods. In embodiments, one or more steps of a method described herein are carried out by a microprocessor and/or computer, and/or carried out in conjunction with memory. In certain embodiments, an automated method is embodied in software, modules, microprocessors, peripherals and/or a machine comprising the like, that perform methods described herein. As used herein, software refers to computer readable program instructions that, when executed by a microprocessor, perform computer operations, as described herein.

[0392] Machines, software and interfaces can be used to conduct methods described herein. Using machines, software and interfaces, a user can enter, request, query or determine options for using particular information, programs or processes (e.g., processing amplification results, processing high resolution melting (HRM) assay results, processing sequence read data, determining one or more characteristics of a plant cultivar based on sequence read data, associating one or more phenotypes of a plant cultivar with one or more genotypes or genetic variations and/or providing an outcome, which can involve implementing statistical analysis algorithms, statistical significance algorithms, statistical algorithms, iterative steps, validation algorithms, and graphical representations, for example. In embodiments, a data set can be entered by a user as input information, a user may download one or more data sets by suitable hardware media (e.g., flash drive), and/or a user can send a data set from one system to another for subsequent processing and/or providing an outcome (e.g., send sequence read data from a sequencer to a computer system for sequence read processing; send processed sequence read data to a computer system for further processing and/or yielding an outcome and/or report).

[0393] A system typically includes one or more machines. Each machine includes one or more of memory, one or more microprocessors, and instructions. Where a system includes two or more machines, some or all of the machines can be located at the same location, some or all of the machines can be located at different locations, all of the machines can be located at one location and/or all of the machines may be located at different locations. Where a system includes two or more machines, some or all of the machines can be located at the same location as a user, some or all of the machines can be located at a location different than a user, all of the machines can be located at the same location as the user, and/or all of the machine can be located at one or more locations different than the user.

[0394] A system sometimes includes a computing machine and a sequencing apparatus or machine, where the sequencing apparatus or machine is configured to receive physical nucleic acid and generate sequence reads, and the computing apparatus is configured to process the reads from the sequencing apparatus or machine. The computing machine sometimes is configured to determine an outcome from the sequence reads.

[0395] A user can, for example, place a query to software which then may acquire a data set via internet access, and in certain embodiments, a programmable microprocessor may be prompted to acquire a suitable data set based on given parameters. A programmable microprocessor also can prompt a user to select one or more data set options selected by the microprocessor based on given parameters. A programmable microprocessor can prompt a user to select one or more data set options selected by the microprocessor based on information found via the internet, other internal or external information, or the like. Options can be chosen for selecting one or more data feature selections, one or more statistical algorithms, one or more statistical analysis algorithms, one or more statistical significance algorithms, iterative steps, one or more validation algorithms, and one or more graphical representations of methods, machines, apparatuses, computer programs or a non-transitory computer-readable storage medium with an executable program stored thereon.

[0396] Systems addressed herein can include general components of computer systems, such as, for example, network servers, laptop systems, desktop systems, handheld systems, personal digital assistants, computing kiosks, and the like. A computer system can include one or more input means such as a keyboard, touch screen, mouse, voice recognition or other means to allow the user to enter data into the system. A system can further include one or more outputs, including, but not limited to, a display screen (e.g., CRT or LCD), speaker, FAX machine, printer (e.g., laser, ink jet, impact, black and white or color printer), or other output useful for providing visual, auditory and/or hardcopy output of information (e.g., outcome and/or report).

[0397] In a system, input and output components can be connected to a central processing unit which may comprise among other components, a microprocessor for executing program instructions and memory for storing program code and data. In embodiments, processes can be implemented as a single user system located in a single geographical site. In certain embodiments, processes can be implemented as a multi-user system. In the case of a multi-user implementation, multiple central processing units can be connected by means of a network. The network can be local, encompassing a single department in one portion of a building, an entire building, span multiple buildings, span a region, span an entire country or be worldwide. The network can be private, being owned and controlled by a provider, or it can be implemented as an internet-based service where the user accesses a web page to enter and retrieve information. Accordingly, in certain embodiments, a system includes one or more machines, which can be local or remote with respect to a user. More than one machine in one location or multiple locations can be accessed by a user, and data can be mapped and/or processed in series and/or in parallel. Thus, a suitable configuration and control can be utilized for mapping and/or processing data using multiple machines, such as in local network, remote network and/or “cloud” computing platforms.

[0398] A system can include a communications interface in some embodiments. A communications interface allows for transfer of software and data between a computer system and one or more external devices. Non-limiting examples of communications interfaces include a modem, a network interface (such as an Ethernet card), a communications port, a PCMCIA slot and card, and the like. Software and data transferred via a communications interface generally are in the form of signals, which can be electronic, electromagnetic, optical and/or other signals capable of being received by a communications interface. Signals often are provided to a communications interface via a channel. A channel often carries signals and can be implemented using wire or cable, fiber optics, a phone line, a cellular phone link, an RF link and/or other communications channels. Thus, in an example, a communications interface can be used to receive signal information that can be detected by a signal detection module.

[0399] Data can be input by a suitable device and/or method, including, but not limited to, manual input devices or direct data entry devices (DDEs). Non-limiting examples of manual devices include keyboards, concept keyboards, touch sensitive screens, light pens, mouse, tracker balls, joysticks, graphic tablets, scanners, digital cameras, video digitizers and voice recognition devices. Non-limiting examples of DDEs include bar code readers, magnetic strip codes, smart cards, magnetic ink character recognition, optical character recognition, optical mark recognition, and turnaround documents.

[0400] A system can include software useful for performing a process or part of a process described herein, and software can include one or more modules for performing such processes (e.g., sequencing module, logic processing module, data display organization module). The term “software” refers to computer readable program instructions that, when executed by a computer, perform computer operations. Instructions executable by the one or more microprocessors sometimes are provided as executable code, that when executed, can cause one or more microprocessors to implement a method described herein. A module described herein can exist as software, and instructions (e.g., processes, routines, subroutines) embodied in the software can be implemented or performed by a microprocessor. For example, a module (e.g., a software module) can be a part of a program that performs a particular process or task. The term “module” refers to a self-contained functional unit that can be used in a larger machine or software system. A module can include a set of instructions for carrying out a function of the module. A module can transform data and/or information. Data and/or information can be in a suitable form. For example, data and/or information can be digital or analogue. In certain embodiments, data and/or information sometimes can be packets, bytes, characters, or bits. In embodiments, data and/or information can be any gathered, assembled or usable data or information. Non-limiting examples of data and/or information include a suitable media, pictures, video, sound (e.g. frequencies, audible or non-audible), numbers, constants, a value, objects, time, functions, instructions, maps, references, sequences, reads, mapped reads, levels, ranges, thresholds, signals, displays, representations, or transformations thereof. A module can accept or receive data and/or information, transform the data and/or information into a second form, and provide or transfer the second form to a machine, peripheral, component or another module. A microprocessor can, in certain embodiments, carry out the instructions in a module. In embodiments, one or more microprocessors are required to carry out instructions in a module or group of modules. A module can provide data and/or information to another module, machine or source and can receive data and/or information from another module, machine or source.

[0401] A computer program product sometimes is embodied on a tangible computer-readable medium, and sometimes is tangibly embodied on a non-transitory computer-readable medium. A module sometimes is stored on a computer readable medium (e.g., disk, drive) or in memory (e.g., random access memory). A module and microprocessor capable of implementing instructions from a module can be located in a machine or in a different machine. A module and/or microprocessor capable of implementing an instruction for a module can be located in the same location as a user (e.g., local network) or in a different location from a user (e.g., remote network, cloud system). In embodiments in which a method is carried out in conjunction with two or more modules, the modules can be located in the same machine, one or more modules can be located in different machine in the same physical location, and one or more modules can be located in different machines in different physical locations.

[0402] A machine, in some embodiments, includes at least one microprocessor for carrying out the instructions in a module. In some embodiments, a machine includes a microprocessor (e.g., one or more microprocessors) which microprocessor can perform and/or implement one or more instructions (e.g., processes, routines and/or subroutines) from a module. In some embodiments, a machine includes multiple microprocessors, such as microprocessors coordinated and working in parallel. In some embodiments, a machine operates with one or more external microprocessors (e.g., an internal or external network, server, storage device and/or storage network (e.g., a cloud)). In embodiments, a machine includes a module one or more modules. A machine that includes a module often is capable of receiving and transferring one or more of data and/or information to and from other modules.

[0403] In certain embodiments, a machine includes peripherals and/or components. In certain embodiments, a machine can include one or more peripherals or components that can transfer data and/or information to and from other modules, peripherals and/or components. In certain embodiments, a machine interacts with a peripheral and/or component that provides data and/or information. In certain embodiments, peripherals and components assist a machine in carrying out a function or interact directly with a module. Non-limiting examples of peripherals and/or components include a suitable computer peripheral, I/O or storage method or device including but not limited to scanners, printers, displays (e.g., monitors, LED, LCT or CRTs), cameras, microphones, pads (e.g., ipads, tablets), touch screens, smart phones, mobile phones, USB I/O devices, USB mass storage devices, keyboards, a computer mouse, digital pens, modems, hard drives, jump drives, flash drives, a microprocessor, a server, CDs, DVDs, graphic cards, specialized I/O devices (e.g., sequencers, photo cells, photo multiplier tubes, optical readers, sensors, etc.), one or more flow cells, fluid handling components, network interface controllers, ROM, RAM, wireless transfer methods and devices (Bluetooth, WiFi, and the like), the world wide web (www), the internet, a computer and/or another module.

[0404] Software often is provided on a program product containing program instructions recorded on a computer readable medium, including, but not limited to, magnetic media including floppy disks, hard disks, and magnetic tape; and optical media including CD-ROM discs, DVD discs, magneto-optical discs, flash memory devices (e.g., flash drives), RAM, floppy discs, the like, and other such media on which the program instructions can be recorded. In online implementation, a server and web site maintained by an organization can be configured to provide software downloads to remote users, or remote users can access a remote system maintained by an organization to remotely access software. Software can obtain or receive input information. Software can include a module that specifically obtains or receives data and may include a module that specifically processes the data (e.g., a processing module that processes received data). The terms “obtaining” and “receiving” input information refers to receiving data by computer communication means from a local, or remote site, human data entry, or any other method of receiving data. The input information may be generated in the same location at which it is received, or it may be generated in a different location and transmitted to the receiving location. In embodiments, input information is modified before it is processed (e.g., placed into a format amenable to processing, e.g., tabulated).

[0405] Software can include one or more algorithms in certain embodiments. An algorithm can be used for processing data and/or providing an outcome or report according to a finite sequence of instructions. An algorithm often is a list of defined instructions for completing a task. Starting from an initial state, the instructions can describe a computation that proceeds through a defined series of successive states, eventually terminating in a final ending state. The transition from one state to the next is not necessarily deterministic (e.g., some algorithms incorporate randomness). By way of example, and without limitation, an algorithm can be a search algorithm, sorting algorithm, merge algorithm, numerical algorithm, graph algorithm, string algorithm, modeling algorithm, computational genometric algorithm, combinatorial algorithm, machine learning algorithm, cryptography algorithm, data compression algorithm, parsing algorithm and the like. An algorithm can include one algorithm or two or more algorithms working in combination. An algorithm can be of any suitable complexity class and/or parameterized complexity. An algorithm can be used for calculation and/or data processing, and in some embodiments, can be used in a deterministic or probabilistic/predictive approach. An algorithm can be implemented in a computing environment by use of a suitable programming language, non-limiting examples of which are C, C++, Java, Perl, Python, Fortran, and the like. In embodiments, an algorithm can be configured or modified to include margin of errors, statistical analysis, statistical significance, and/or comparison to other information or data sets (e.g., applicable when using a neural net or clustering algorithm).

[0406] In certain embodiments, several algorithms can be implemented for use in software. These algorithms can be trained with raw data in some embodiments. For each new raw data sample, the trained algorithms can produce a representative processed data set or outcome. A processed data set sometimes is of reduced complexity compared to the parent data set that was processed. Based on a processed set, the performance of a trained algorithm can be assessed based on sensitivity and specificity, in some embodiments. An algorithm with the highest sensitivity and/or specificity can be identified and utilized, in certain embodiments.

[0407] In certain embodiments, simulated (or simulation) data can aid data processing, for example, by training an algorithm or testing an algorithm. In embodiments, simulated data includes hypothetical various samplings of different groupings of sequence reads, genotypes, phenotypes, genetic variations, and/or genetic variation signatures. Simulated data can be based on what might be expected from a real population or may be skewed to test an algorithm and/or to assign a correct classification. Simulated data also is referred to herein as “virtual” data. Simulations can be performed by a computer program in certain embodiments. One possible step in using a simulated data set is to evaluate the confidence of identified results, e.g., how well a random sampling matches or best represents the original data. One approach is to calculate a probability value (p-value), which estimates the probability of a random sample having better score than the selected samples. In embodiments, an empirical model may be assessed, in which it is assumed that at least one sample matches a reference sample (with or without resolved variations). In certain embodiments, another distribution, such as a Poisson distribution for example, can be used to define the probability distribution.

[0408] A system can include one or more microprocessors in certain embodiments. A microprocessor can be connected to a communication bus. A computer system can include a main memory, often random access memory (RAM), and can also include a secondary memory. Memory in some embodiments includes a non-transitory computer-readable storage medium. Secondary memory can include, for example, a hard disk drive and/or a removable storage drive, representing a floppy disk drive, a magnetic tape drive, an optical disk drive, memory card and the like. A removable storage drive often reads from and/or writes to a removable storage unit. Non-limiting examples of removable storage units include a floppy disk, magnetic tape, optical disk, and the like, which can be read by and written to by, for example, a removable storage drive. A removable storage unit can include a computer-usable storage medium having stored therein computer software and/or data.

[0409] A microprocessor can implement software in a system. In some embodiments, a microprocessor can be programmed to automatically perform a task described herein that a user could perform. Accordingly, a microprocessor, or algorithm conducted by such a microprocessor, can require little to no supervision or input from a user (e.g., software may be programmed to implement a function automatically). In some embodiments, the complexity of a process is so large that a single person or group of persons could not perform the process in a timeframe short enough for determining one or more characteristics of a sample.

[0410] In certain embodiments, secondary memory can include other similar means for allowing computer programs or other instructions to be loaded into a computer system. For example, a system can include a removable storage unit and an interface device. Non-limiting examples of such systems include a program cartridge and cartridge interface (such as that found in video game devices), a removable memory chip (such as an EPROM, or PROM) and associated socket, and other removable storage units and interfaces that allow software and data to be transferred from the removable storage unit to a computer system.

### Compositions and Kits

[0411] Provided in certain embodiments are compositions. Compositions useful for carrying out any of the methods described herein are provided. For example, compositions that include any of the primers, primer pairs and sets of more than one primer pair described herein are provided. In certain embodiments, the compositions include one or more of primers or primer pairs for identifying monoterpene synthases, primers or primer pairs for identifying diterpene synthases and primers or primer pairs for identifying sesquiterpene synthases. In embodiments, the compositions include one or more of primers or primer pairs for identifying monoterpene synthases. In embodiments the compositions include one or more of primers or primer pairs for identifying diterpene synthases. In embodiments, the compositions include one or more of primers or primer pairs for identifying sesquiterpene synthases. In any of the compositions provided herein, in certain embodiments, the primers are selected from among those of SEQ ID NOS:1-1284; from among the LAMP primers of SEQ ID NOS:1285-1327 or the LAMP primer sets of SEQ ID NOS:1285-1293; 1294-1302; 1303-1311; 1312-1319 and 1320-1327; or from among the full-length amplifying primers of SEQ ID NOS:1328-1338. In embodiments, the primers are selected from among those set forth in SEQ ID NOS: 1-1284, from among the LAMP primers of SEQ ID NOS: 1285-1327 or the LAMP primer sets of SEQ ID NOS: 1285-1293; 1294-1302; 1303-1311; 1312-1319 and 1320-1327, or from among the full-length amplifying primers of SEQ ID NOS:1328-1338 or sequences that share 90%, 91%, 92%, 93%, 94%, 95%, 96%, 97%, 98%, 99% or more identity with any of the sequences set forth in SEQ ID NOS: 1-1284, the LAMP primers of SEQ ID NOS:1-1327 or the LAMP primer sets of SEQ ID NOS:1285-1293; 1294-1302; 1303-1311; 1312-1319 and 1320-1327, or from among the full-length amplifying primers of SEQ ID NOS:1328-1338. In embodiments, any of the forward primers in the primer pairs provided in SEQ ID NOS: 1-1284, or in sequences that share 90%, 91%, 92%, 93%, 94%, 95%, 96%, 97%, 98%, 99% or more identity with any of the sequences set forth in SEQ ID NOS: 1-1284, can be paired with any of the reverse primers of the primer pairs having the sequences set forth in SEQ ID NOS: 1-1284, or in sequences that share 90%, 91%, 92%, 93%, 94%, 95%, 96%, 97%, 98%, 99% or more identity with any of the sequences set forth in SEQ ID NOS: 1-1284.

[0412] In embodiments, the primer pairs of the compositions provided herein are complementary to a unique subsequence of a TPS gene or a paralog thereof, wherein the unique subsequence of the TPS gene or paralog thereof is different than the other subsequences of the TPS gene or paralog thereof and is different than the subsequences of other TPS genes or paralogs thereof. In certain embodiments, the TPS gene or a paralog thereof is of a Cannabis cultivar. In embodiments, the compositions provided herein include at least one primer or primer pair that is complementary to a genetically modified TPS gene or paralog thereof.

### Kits

[0413] Provided in certain embodiments are kits. The kits can include any components and compositions described herein, e.g., primers, primer pairs, primer sets, including LAMP primer sets, reagents for hybridization or amplification of at least one TPS gene or paralog thereof, solid supports, collections of solid supports, one or more detection labels for detecting amplicons and instructions for use to, e.g., analyze the TPS gene profile of a plant cultivar of interest, or to identify a genetically modified plant cultivar of interest. A kit for amplifying nucleic acid from an RNA template can further include reagents for reverse transcription (e.g., for generating cDNA).

[0414] Components of a kit can be present in separate containers, or multiple components can be present in a single container. In embodiments, primers are provided such that each container contains a single primer pair (e.g., for individual amplification reactions). In certain embodiments, primers are provided such that one container contains a plurality of primer pairs (e.g., for multiplexed amplification reactions). Suitable containers include a single tube (e.g., vial), one or more wells of a plate (e.g., a 96-well plate, a 384-well plate, and the like), chips and the like.

[0415] Kits also can include instructions for performing one or more methods described herein and/or a description of one or more components described herein. For example, a kit can include instructions for using the amplification primers provided herein, to amplify nucleic acid (e.g., to amplify unique subsequences of a TPS gene or paralog thereof in a plant cultivar). In certain embodiments, a kit can include instructions or a guide for interpreting the results of an amplification reaction. Instructions and/or descriptions can be in printed form and can be included in a kit insert. In embodiments, instructions and/or descriptions are provided as an electronic storage data file present on a suitable computer readable storage medium, e.g., portable flash drive, DVD, CD-ROM, diskette, and the like. A kit also can include a written description of an internet location that provides such instructions or descriptions.

### EXAMPLES

[0416] The examples set forth below illustrate certain embodiments and do not limit the technology.

### Example 1: Primer Design to Identify Terpene Synthase Genes Based on Exon-Specific Amplification

[0417] This example describes the design and synthesis of primers that differentiate between terpene synthase genes or paralogs thereof based on amplifying unique regions encompassing all or a portion of certain exons of each gene or paralog thereof.

[0418] Primers were designed to target unique sequences within each terpene synthase exon of 75 terpene synthase genes, based on the genome assembly and sequence of Cannabis sativa (eudicots) (Genbank Accession Number GCF_900626175.1). The high homology of terpene synthase exon paralogs throughout the genome posed a challenge with respect to obtaining primers that target single specific target sequences and satisfy primer design parameters. 74 out of the 75 genes were able to be uniquely targeted, the exception being the Cannabis sativa TPS2 gene from the Jamaican Lion cultivar (CsTPS2JL). The parameters were as follows, with exceptions where specified if the ideal design was not possible due to the sequence similarity between similar exons in the genome.
[0419] Tools Used: NCBI's primer designer tool using Primer3
[0420] Ideal Target: Primers target conserved regions of the exon that contains a region of variability within the amplicon but not in the primed loci, i.e., in the primer binding sites.
[0421] Ideal product size: 50-150 bp
[0422] Maximum allowed product size: 292 bp
[0423] Primer Melting Temperature: 57-63° C. (max Tm difference 3° C.)
[0424] Must have 5 mismatches overall, to non-specific genomic targets

[0425] In addition, for non-specific genomic targets, must have 3 mismatches within 5 bp of the 3′ end of each primer
[0426] When possible, primers were designed to have a GC clamp on the 3′ and 5′ ends
[0427] Maximum Self Complementarity: Generally 5, with 6 permitted in a few primer sets
[0428] Maximum 3′ Self Complementarity: 5

[0429] Each primer set that was designed aimed to span as much of an entire individual exon target as possible, or multiple sets of primers were designed for an individual exon target to cover as much of the exon target as specificity would allow. This allows for each individual exon to be genotyped, providing an exon-based enzyme genotyping system that can be used on genomic DNA and provides a higher level of differentiation between genes that have a high percentage of sequence identity.

[0430] Using this design process, certain exons were identified that could not be targeted due to their homology to other loci in the genome. The Table provided in FIG. 6 (Table 1) is coded for each exon that could be targeted (light grey) and for each exon that could not be targeted (dark grey) for 75 terpene synthase paralogs. The design of 2 primer sets for a single exon is denoted by 2X and the design of 3 primer sets for a single exon is denoted by 3X. The blacked-out exons indicate that the genes do not contain those exons.

[0431] The primer sequences that were designed, and their corresponding target terpene synthase paralogs, are set forth in the Table 2 below. These primers specifically targeted the identified coding regions (exons) of the terpene synthase genes but could also be used to examine informative introns through using other combinations of the primers described herein.

TABLE 2

| Gene name | Exon # | Primer Name | Primer Seq (5'->3') | Seq ID# |
|---|---|---|---|---|
| TPS11JL | 1 | TPS11JL-1F | ATATTCAAAGATCAACCAGCAGC | SEQ ID 1 |
| TPS11JL | 1 | TPS11JL-1R | TGTGGGTTTGTAGTTGCCTGAT | SEQ ID 2 |
| TPS11JL | 2a | TPS11JL-2aF | AGCTATGGGAAAAGAATCAATGAGC | SEQ ID 3 |
| TPS11JL | 2a | TPS11JL-2aR | GAGTTTGAAATGAAGAGCAGTGG | SEQ ID 4 |
| TPS11JL | 2b | TPS11JL-2bF | GAGGCTGAAAATCCTTTAGTTAAGC | SEQ ID 5 |
| TPS11JL | 2b | TPS11JL-2bR | ACAGGACTGAATCCATATTGTCTAAGG | SEQ ID 6 |
| TPS11JL | 3a | TPS11JL-3aF | AGATGAAGCAAGAGATTTCACAACC | SEQ ID 7 |
| TPS11JL | 3a | TPS11JL-3aR | AATGGAGTGGAAGATCCAAGGC | SEQ ID 8 |
| TPS11JL | 3b | TPS11JL-3bF | ATGCCTTGGATCTTCCACTCC | SEQ ID 9 |
| TPS11JL | 3b | TPS11JL-3bR | CTTTTTGGTATGCTGACTGAACG | SEQ ID 10 |
| TPS11JL | 4 | TPS11JL-4F | CATTTGCTAGAGACAGAGTAGTGG | SEQ ID 11 |
| TPS11JL | 4 | TPS11JL-4R | GCTGAAGCTCATCTAGTGTACC | SEQ ID 12 |
| TPS11JL | 5 | TPS11JL-5F | TGAACTGGATCAGCTACCCG | SEQ ID 13 |
| TPS11JL | 5 | TPS11JL-5R | GTGTGAATCCCATTTTCTTTGAGG | SEQ ID 14 |
| TPS11JL | 6 | TPS11JL-6F | GTTGGGTGATCTGTGTAAATGC | SEQ ID 15 |
| TPS11JL | 6 | TPS11JL-6R | CTGAGACACGTAAAATGGTTGG | SEQ ID 16 |
| TPS11JL | 7 | TPS11JL-7F | TGCTACATGCGTGAAAAGGG | SEQ ID 17 |
| TPS11JL | 7 | TPS11JL-7R | TGTGGTACATCTCCATTGCTCC | SEQ ID 18 |
| TPS11-like1JL | 1 | TPS11-like1JL-1F | ATGTGCTGTGGTCAATAGTTCT | SEQ ID 19 |
| TPS11-like1JL | 1 | TPS11-like1JL-1R | AAAGACCAAATGGAGGGCTCA | SEQ ID 20 |
| TPS11-like1JL | 2 | TPS11-like1JL-2F | ACAGGTCGAGTCAAAGAATTGG | SEQ ID 21 |
| TPS11-like1JL | 2 | TPS11-like1JL-2R | GCCATGTTGACGTAGAAGCC | SEQ ID 22 |
| TPS11-like1JL | 3a | TPS11-like1JL-3aF | AGGAAGAGATAGGAAAAATCAAAGCG | SEQ ID 23 |
| TPS11-like1JL | 3a | TPS11-like1JL-3aR | GCGTCGATGAACCACTTAGC | SEQ ID 24 |
| TPS11-like1JL | 3b | TPS11-like1JL-3bF | TAAGGAAGAGATAGGAAAAATCAAAGC | SEQ ID 25 |
| TPS11-like1JL | 3b | TPS11-like1JL-3bR | TTGTAGTCCTCCGATGAAGTGG | SEQ ID 26 |
| TPS11-like1JL | 4 | TPS11-like1JL-4F | TGGAGGCATACTAAACTTGGGG | SEQ ID 27 |
| TPS11-like1JL | 4 | TPS11-like1JL-4R | AAGCTCTAATTCATCCAATGTTCC | SEQ ID 28 |
| TPS11-like1JL | 5 | TPS11-like1JL-5F | GATGGGATATGGAAATGATAAATGAGT | SEQ ID 29 |
| TPS11-like1JL | 5 | TPS11-like1JL-5R | TGTTGATGGAGATGTGTTGGTCT | SEQ ID 30 |
| TPS11-like1JL | 6 | TPS11-like1JL-6F | GGATTTCAGTGGGAGCACCG | SEQ ID 31 |
| TPS11-like1JL | 6 | TPS11-like1JL-6R | GCACTATGACGAATTATGGCGG | SEQ ID 32 |
| TPS11-like1JL | 7 | TPS11-like1JL-7F | TGAAAAGAGGTGATGCTCCG | SEQ ID 33 |
| TPS11-like1JL | 7 | TPS11-like1JL-7R | CCATGCTGATACATGAAAAATCCC | SEQ ID 34 |
| TPS12JL | 1 | TPS12JL-1F | ATCCTTAATACTACAAAATTAGCAAGAGC | SEQ ID 35 |
| TPS12JL | 1 | TPS12JL-1R | AATGTAATCAAAAGACCAAATGGGAGG | SEQ ID 36 |
| TPS12JL | 2 | TPS12JL-2F | AGTAGATTGAATGAGCTAGAGGC | SEQ ID 37 |
| TPS12JL | 2 | TPS12JL-2R | AATTCGAGAGCTGTGGCG | SEQ ID 38 |
| TPS12JL | 3 | TPS12JL-3F | AAGCAAGTTCAAGGCAAGAACG | SEQ ID 39 |
| TPS12JL | 3 | TPS12JL-3R | GATGGTTTGTTTCGCTCCATCG | SEQ ID 40 |
| TPS12JL | 4 | TPS12JL-4F | GGAGTGTTTCTTATGGACTGTGG | SEQ ID 41 |
| TPS12JL | 4 | TPS12JL-4R | GAAAAGCTCTAATTCCTCCAATGTTCC | SEQ ID 42 |
| TPS12JL | 5 | TPS12JL-5F | TGTGAAAGCAATGGATGATTTACC | SEQ ID 43 |
| TPS12JL | 5 | TPS12JL-5R | AATTTTGGTGTCCTAACACATCG | SEQ ID 44 |
| TPS12JL | 6a | TPS12JL-6aF | TCTGTAAACATCAATTACAAGAGGC | SEQ ID 45 |
| TPS12JL | 6a | TPS12JL-6aR | TCGGTCCTGATACCGAAATCC | SEQ ID 46 |
| TPS12JL | 6b | TPS12JL-6bF | ATGGATTTCGGTATCAGGACCG | SEQ ID 47 |
| TPS12JL | 6b | TPS12JL-6bR | CATCTGTAAGTCGTAGAATCATGG | SEQ ID 48 |
| TPS12JL | 7 | TPS12JL-7F | TAATGAAGATGAAAATATGGACTCTCC | SEQ ID 49 |
| TPS12JL | 7 | TPS12JL-7R | GATAAACTATCCTGAGAAGCATGTCC | SEQ ID 50 |
| TPS12-likeJL | 1a | TPS12-likeJL-1aF | TGTCCACTCAAATCTTAGCATCA | SEQ ID 51 |
| TPS12-likeJL | 1a | TPS12-likeJL-1aR | TGAAATGTTTTTGTAGGACGAACA | SEQ ID 52 |
| TPS12-likeJL | 1b | TPS12-likeJL-1bF | CAACCCAAATAAAATTGTTCGTCC | SEQ ID 53 |
| TPS12-likeJL | 1b | TPS12-likeJL-1bR | TTGTGAAATGTTGTAATGTAAGAATCG | SEQ ID 54 |
| TPS12-likeJL | 2a | TPS12-likeJL-2aF | TGTCAACAACAAAAGGTTGAGG | SEQ ID 55 |
| TPS12-likeJL | 2a | TPS12-likeJL-2aR | AGTCTAAACCGTAAAGAAACATGG | SEQ ID 56 |
| TPS12-likeJL | 2b | TPS12-likeJL-2bF | AAAGGTTGAGGAATTAAAGGAAGTGG | SEQ ID 57 |
| TPS12-likeJL | 2b | TPS12-likeJL-2bR | TCAAAATGATAAGACAATCCCAAACG | SEQ ID 58 |
| TPS12-likeJL | 3a | TPS12-likeJL-3aF | TGAAAAATTCAAAGACGAGGATGGG | SEQ ID 59 |
| TPS12-likeJL | 3a | TPS12-likeJL-3aR | AAGGGCCTCTCTAGGGCTCG | SEQ ID 60 |
| TPS12-likeJL | 3b | TPS12-likeJL-3bF | ACACTTAACCGAGTTTTTGGC | SEQ ID 61 |
| TPS12-likeJL | 3b | TPS12-likeJL-3bR | TGCTGACTTCACAAAGCTCC | SEQ ID 62 |
| TPS12-likeJL | 4 | TPS12-likeJL-4F | TGCAAGAGATAGGATTGTGGAAT | SEQ ID 63 |
| TPS12-likeJL | 4 | TPS12-likeJL-4R | GCATGAGTTAGGATCTCAAGTTCTTC | SEQ ID 64 |
| TPS12-likeJL | 5 | TPS12-likeJL-5F | TGGGATATAAATTGTGTGGATAAACTG | SEQ ID 65 |
| TPS12-likeJL | 5 | TPS12-likeJL-5R | GCACTTGCTCAAACTCTTCATAACAA | SEQ ID 66 |
| TPS12-likeJL | 6a | TPS12-likeJL-6aF | TGTTTGCATAGAGGACTCATCCC | SEQ ID 67 |
| TPS12-likeJL | 6a | TPS12-likeJL-6aR | AGTTTTCATTCCAACCAAAGAGC | SEQ ID 68 |
| TPS12-likeJL | 6b | TPS12-likeJL-6bF | TTTGGATGAAGCTCGATGTTTGC | SEQ ID 69 |
| TPS12-likeJL | 6b | TPS12-likeJL-6bR | AGTAACAGATGCTCTAATAATCTTTCG | SEQ ID 70 |
| TPS12-likeJL | 7a | TPS12-likeJL-7aF | ATGAGGAACATTCAGCAGTGG | SEQ ID 71 |
| TPS12-likeJL | 7a | TPS12-likeJL-7aR | AGCACGAAGTAATATAGGTGAAGC | SEQ ID 72 |
| TPS12-likeJL | 7b | TPS12-likeJL-7bF | ATGGCGTTTGTGAAGAGGAAGC | SEQ ID 73 |
| TPS12-likeJL | 7b | TPS12-likeJL-7bR | AATTGGATGAATAAGCAAAGCAGC | SEQ ID 74 |
| TPS13JL | 1 | TPS13JL-1F | TCCTTAGTTCTACAAAATTAGCAAGAGC | SEQ ID 75 |
| TPS13JL | 1 | TPS13JL-1R | GTAATCAAAAGACCAAATGGGAGG | SEQ ID 76 |
| TPS13JL | 2 | TPS13JL-2F | ACAAGTAGATTGAATGAGCTAGAAGC | SEQ ID 77 |
| TP513JL | 2 | TPS13JL-2R | TCATAACCATGTTGTCGTAGAAGC | SEQ ID 78 |
| TPS13JL | 3a | TPS13JL-3aF | GTTCAAGGCAAGAAGGAGTAGC | SEQ ID 79 |
| TPS13JL | 3a | TPS13JL-3aR | TTTGCTCCATCGTCATCGTCG | SEQ ID 80 |
| TPS13JL | 3b | TPS13JL-3bF | ATTATGCAGCGACGATGACG | SEQ ID 81 |
| TPS13JL | 3b | TPS13JL-3bR | CCTTGCTTCTGATCTTGTTATTCTCC | SEQ ID 82 |
| TPS13JL | 4 | TPS13JL-4F | TGGAGTGTTTCTTATGGACTGTGG | SEQ ID 83 |
| TPS13JL | 4 | TPS13JL-4R | CTCTCAACAGCATTAGTGAAAAGC | SEQ ID 84 |
| TPS13JL | 5 | TPS13JL-5F | TGTGAAAGCAATGGATGATTTACC | SEQ ID 85 |
| TPS13JL | 5 | TPS13JL-5R | AATTTTGGTCTCCTAACACATCG | SEQ ID 86 |
| TPS13JL | 6 | TPS13JL-6F | GGCGAAATGGTTTCACAGTGG | SEQ ID 87 |
| TPS13JL | 6 | TPS13JL-6R | CGTAGAATCATGGATGCGTGG | SEQ ID 88 |
| TPS13JL | 7 | TPS13JL-7F | AAATAATGAAGATGAAAATATGGACTCTCC | SEQ ID 89 |
| TPS13JL | 7 | TPS13JL-7R | GATAAACTATCCTGAGAAGCATGTCC | SEQ ID 90 |
| TPS13-like1JL | 1 | TPS13-like1JL-1F | AAACTATCAACCTTCACTTTGGC | SEQ ID 91 |
| TPS13-like1JL | 1 | TPS13-like1JL-1R | TTCCTCTTTTGCTCTCTTCACC | SEQ ID 92 |
| TPS13-like1JL | 2 | TPS13-like1JL-2F | TGCAAAGACTTGGAATCTCTTATCAC | SEQ ID 93 |
| TPS13-like1JL | 2 | TPS13-like1JL-2R | GAGACACCGGATAACCATGTTG | SEQ ID 94 |
| TPS13-like1JL | 3 | TPS13-like1JL-3F | GAGGCAATTTTATGGTGTGTACC | SEQ ID 95 |
| TPS13-like1JL | 3 | TPS13-like1JL-3R | TCTTTGTTGTTTCTCTTGTCTCTTCC | SEQ ID 96 |
| TPS13-like1JL | 4a | TPS13-like1JL-4aF | TGGGAAAGCACTGGTATGGG | SEQ ID 97 |
| TPS13-like1JL | 4a | TPS13-like1JL-4aR | AGCTCCAATTCATCTAGTGTACC | SEQ ID 98 |
| TPS13-like1JL | 4b | TPS13-like1JL-4bF | GTGGGAAAGCACTGGTATGGG | SEQ ID 99 |
| TPS13-like1JL | 4b | TPS13-like1JL-4bR | AATTTTTGTAATGTGGCTCAAATGC | SEQ ID 100 |
| TPS13-like1JL | 5 | TPS13-like1JL-5F | TGGGATATTAGTGCTATGGATGGG | SEQ ID 101 |
| TPS13-like1JL | 5 | TPS13-like1JL-5R | TTCTGAAGGAATTTTATTATATGGAGGC | SEQ ID 102 |
| TPS13-like1JL | 6 | TPS13-like1JL-6F | TAGTGAATCCAAACAAGGAAGATGC | SEQ ID 103 |
| TPS13-like1JL | 6 | TPS13-like1JL-6R | TCATCTGTAAGACGTAAAATCATCG | SEQ ID 104 |
| TPS13-like1JL | 7 | TPS13-like1JL-7F | GATGGCGTGTTTGAAGAAGAAGC | SEQ ID 105 |
| TPS13-like1JL | 7 | TPS13-like1JL-7R | TGATAGTACATGATCTTTTGTTTGGC | SEQ ID 106 |
| TPS13-like2JL | 1 | TPS13-like2JL-1F | TTCTCGAAGATCAGCAAACTATCAAC | SEQ ID 107 |
| TPS13-like2JL | 1 | TPS13-like2JL-1R | TTGAAAGGGGTAGAAAGTGATTGTA | SEQ ID 108 |
| TPS13-like2JL | 2a | TPS13-like2JL-2aF | AGGTAAGAGTAATGGTGAAGAGAGC | SEQ ID 109 |
| TPS13-like2JL | 2a | TPS13-like2JL-2aR | CATTCTCAAAGTGGTAAGAGATTCC | SEQ ID 110 |
| TPS13-like2JL | 2b | TPS13-like2JL-2bF | GAGCAAAAGAGGAGGAGAAGCC | SEQ ID 111 |
| TPS13-like2JL | 2b | TPS13-like2JL-2bR | GGCATAGACATTTTTGTTGGTGTTGC | SEQ ID 112 |
| TPS13-like2JL | 3 | TPS13-like2JL-3F | GAGGCAATTTTATGGTGTCTTCC | SEQ ID 113 |
| TPS13-like2JL | 3 | TPS13-like2JL-3R | TGTTGTGTGTCTTGTCTCTTCC | SEQ ID 114 |
| TPS13-like2JL | 4 | TPS13-like2JL-4F | TGGGAAAGCACTGATATGGG | SEQ ID 115 |
| TPS13-like2JL | 4 | TPS13-like2JL-4R | AGCTCCAATTCATCTAGTGTACC | SEQ ID 116 |
| TPS13-like2JL | 5 | TPS13-like2JL-5F | TGGGATATTAGTGCTATGGATGGG | SEQ ID 117 |
| TPS13-like2JL | 5 | TPS13-like2JL-5R | TTCTGAAGGAATTTTATTATATGGAGGC | SEQ ID 118 |
| TPS13-like2JL | 6 | TPS13-like2JL-6F | AGCTTTGAAGAGTACATTGAGAATGC | SEQ ID 119 |
| TPS13-like2JL | 6 | TPS13-like2JL-6R | ATCATCTGTAAGTCGTAAAATCATCG | SEQ ID 120 |
| TPS13-like2JL | 7a | TPS13-like2JL-7aF | GGCGATGTTCCCAAATCAATCC | SEQ ID 121 |
| TPS13-like2JL | 7a | TPS13-like2JL-7aR | AACATTGGAGAGTAGTCATCACC | SEQ ID 122 |
| TPS13-like2JL | 7b | TPS13-like2JL-7bF | GATGATGATGGTGATGACTACTCTCC | SEQ ID 123 |
| TPS13-like2JL | 7b | TPS13-like2JL-7bR | GATAGTACATGATCTTTTGTATGGCG | SEQ ID 124 |
| TPS13PK | 2 | TPS13PK-2F | GATCAGCAAACTATCAACCCCC | SEQ ID 125 |
| TPS13PK | 2 | TPS13PK-2R | TCACCATCACTCTTACTTCTTCC | SEQ ID 126 |
| TPS13PK | 3 | TPS13PK-3F | ACTTGGAATCTCTTATCACTTTGAGG | SEQ ID 127 |
| TPS13PK | 3 | TPS13PK-3R | AGAGAATTGGCATACACATTATTATTGG | SEQ ID 128 |
| TPS13PK | 4 | TPS13PK-4F | GAGGCAATTTTATGGTGTGTACC | SEQ ID 129 |
| TPS13PK | 4 | TPS13PK-4R | TTTCTCTTGTCTCTTCCAAAATACC | SEQ ID 130 |
| TPS13PK | 5a | TPS13PK-5aF | TGGTGGGAAAGCACTGATATGG | SEQ ID 131 |
| TPS13PK | 5a | TPS13PK-5aR | AATGTGGCTCAAATGCAACTCC | SEQ ID 132 |
| TPS13PK | 5b | TPS13PK-5bF | TGGGAAAGCACTGATATGGG | SEQ ID 133 |
| TPS13PK | 5b | TPS13PK-5bR | AGCTCCAATTCATCTAGTGTACC | SEQ ID 134 |
| TPS13PK | 6 | TPS13PK-6F | TGGGATATTAGTGCTATGGATGGG | SEQ ID 135 |
| TPS13PK | 6 | TPS13PK-6R | TTCTGAAGGAATTTTATTATATGGAGGC | SEQ ID 136 |
| TPS13PK | 7a | TPS13PK-7aF | GCTTTGAAGAGTACATTGAGAATGC | SEQ ID 137 |
| TPS13PK | 7a | TPS13PK-7aR | CGATGAATGTCGTATTATGGTAGGG | SEQ ID 138 |
| TPS13PK | 7b | TPS13PK-7bF | GTGAATCCAAACAAGGAAAATGCC | SEQ ID 139 |
| TPS13PK | 7b | TPS13PK-7bR | TGAAGTTCCCATATCATCTTTAAGTCG | SEQ ID 140 |
| TPS13PK | 8a | TPS13PK-8aF | TGAATTGAAAAGAGGCGATGTTCC | SEQ ID 141 |
| TPS13PK | 8a | TPS13PK-8aR | ACATTGGAGAGTAGTCATCACC | SEQ ID 142 |
| TPS13PK | 8b | TPS13PK-8bF | TGGTATATCTGAAGAGGAAGCTCG | SEQ ID 143 |
| TPS13PK | 8b | TPS13PK-8bR | AGAACATTGGAGAGTAGTCATCACC | SEQ ID 144 |
| TPS14CT | 1 | TPS14CT-1F | GCATAGCTTTTCACCAATTTGC | SEQ ID 145 |
| TPS14CT | 1 | TPS14CT-1R | GGGAGGGATGATGATGAAGCA | SEQ ID 146 |
| TPS14CT | 2 | TPS14CT-2F | CAATGTACTGTGGTCGATAACCC | SEQ ID 147 |
| TPS14CT | 2 | TPS14CT-2R | GAACAAAATCAAAAGACCAAATGGG | SEQ ID 148 |
| TPS14CT | 3 | TPS14CT-3F | TGGAGAAAGATGTGAAAAGGATGC | SEQ ID 149 |
| TPS14CT | 3 | TPS14CT-3R | ATTGGCGTAGAAGCCTAAATTGG | SEQ ID 150 |
| TPS14CT | 4 | TPS14CT-4F | TCACAAGACAGGAGAGTTCAAGG | SEQ ID 151 |
| TPS14CT | 4 | TPS14CT-4R | TGAAGTGGCATCTCCAAAGC | SEQ ID 152 |
| TPS14CT | 5a | TPS14CT-5aF | TGGTGGAAGGATTCTAAACTTGG | SEQ ID 153 |
| TPS14CT | 5a | TPS14CT-5aR | CTCCAATGTTCCATAAATGTCATGC | SEQ ID 154 |
| TPS14CT | 5b | TPS14CT-5bF | GCAAGTTGGAGTAAGATTTGAGC | SEQ ID 155 |
| TPS14CT | 5b | TPS14CT-5bR | ATTAGTGAAAAGTTGTAGTTCCTCC | SEQ ID 156 |
| TPS14CT | 7a | TPS14CT-7aF | AAGAGGCAAAATGGTTTTATAGTGG | SEQ ID 157 |
| TPS14CT | 7a | TPS14CT-7aR | TTGGTAACAGGATTTGTAAAAGCG | SEQ ID 158 |
| TPS14CT | 7b | TPS14CT-7bF | GGATGGTTGTCTGTGGGAGG | SEQ ID 159 |
| TPS14CT | 7b | TPS14CT-7bR | TGCATGGCGAACTATGTTAGG | SEQ ID 160 |
| TPS14CT | 8 | TPS14CT-8F | TGCAAAAATCTTGGTAGAGCG | SEQ ID 161 |
| TPS14CT | 8 | TPS14CT-8R | TGGGGATAGGAGTAATAATCAACCC | SEQ ID 162 |
| TPS14JL | 1 | TPS14JL-1F | ATATTCAAGTCTTAGCTTCATCTCAATTA | SEQ ID 163 |
| TPS14JL | 1 | TPS14JL-1R | ATCGCCCCAAATAGAAGGGTG | SEQ ID 164 |
| TPS14JL | 2 | TPS14JL-2F | TTTGAGAGTGAAATTGAGAAATTGTTGG | SEQ ID 165 |
| TPS14JL | 2 | TPS14JL-2R | TAAATCCATGTTGTCTTAATAATCTAAACC | SEQ ID 166 |
| TPS14JL | 3 | TPS14JL-3F | GGTTTGCTTAGCTTGTATGAGGC | SEQ ID 167 |
| TPS14JL | 3 | TPS14JL-3R | GCCTCTCTATGGTCTTTCTTAGAGG | SEQ ID 168 |
| TPS14JL | 4 | TPS14JL-4F | TGGTGGAAAGAGCATGAGTTTGC | SEQ ID 169 |
| TPS14JL | 4 | TPS14JL-4R | ATTGAGGCTAATGCAATGACTTTGG | SEQ ID 170 |
| TPS14JL | 6 | TPS14JL-6F | AGCTCGATGGTTGAGTGAAGG | SEQ ID 171 |
| TPS14JL | 6 | TPS14JL-6R | CTAGCAAGGAGAGTGGAAGC | SEQ ID 172 |
| TPS14JL | 7a | TPS14JL-7aF | TGAGCAAAAGAGAAATCACATACC | SEQ ID 173 |
| TPS14JL | 7a | TPS14JL-7aR | TTTCTTTCCAGTGGGTGTCC | SEQ ID 174 |
| TPS14JL | 7b | TPS14JL-7bF | TGAAACAATATGGGGTATCAGAGG | SEQ ID 175 |
| TPS14JL | 7b | TPS14JL-7bR | AATGCTTTCTTTGAGCACTTTTCC | SEQ ID 176 |
| TPS15CT | 1a | TPS15CT-1aF | GCATTGTATGGCTGTTCACC | SEQ ID 177 |
| TPS15CT | 1a | TPS15CT-1aR | TCGAAAGACCAAATCGGAGG | SEQ ID 178 |
| TPS15CT | 1b | TPS15CT-lbF | TCACACCAAAAACATCTATTAGTCC | SEQ ID 179 |
| TPS15CT | 1b | TPS15CT-lbR | CAAATCGGAGGTTCATAATTGGC | SEQ ID 180 |
| TPS15CT | 2a | TPS15CT-2aF | AAGAAAGAAGTGACAAGAATGCTCC | SEQ ID 181 |
| TPS15CT | 2a | TPS15CT-2aR | ACTGTATAGCCATGTTGGCG | SEQ ID 182 |
| TPS15CT | 2b | TPS15CT-2bF | GAAATTAACTCTTTAGCCCTACTCG | SEQ ID 183 |
| TPS15CT | 2b | TPS15CT-2bR | AGCCTAAATTCGAGAGCAATGG | SEQ ID 184 |
| TPS15CT | 3a | TPS15CT-3aF | TGCTTTCAAGGATAAGAGAGGG | SEQ ID 185 |
| TPS15CT | 3a | TPS15CT-3aR | TCTTCCTCATTCTCCATTTTCTCC | SEQ ID 186 |
| TPS15CT | 3b | TPS15CT-3bF | CATGGAGAAAATGGAGAATGAGG | SEQ ID 187 |
| TPS15CT | 3b | TPS15CT-3bR | TCGCAAACTCGAACAAAGTCG | SEQ ID 188 |
| TPS15CT | 4 | TPS15CT-4F | TTGCTAGAGATAGATTGATGGAAGC | SEQ ID 189 |
| TPS15CT | 4 | TPS15CT-4R | AAAGCTCTAATTCCTCCAAAGTTCC | SEQ ID 190 |
| TPS15CT | 5 | TPS15CT-5F | ACCAGATTACATGAAGATGCCTT | SEQ ID 191 |
| TPS15CT | 5 | TPS15CT-5R | CTAATACATCGAACCCCATCTCA | SEQ ID 192 |
| TPS15CT | 6a | TPS15CT-6aF | GGTATTATAGTGGATACCAACCAAC | SEQ ID 193 |
| TPS15CT | 6a | TPS15CT-6aR | AAGCCAACCCAACTCAGTGT | SEQ ID 194 |
| TPS15CT | 6b | TPS15CT-6bF | ACACTGAGTTGGGTTGGCTTT | SEQ ID 195 |
| TPS15CT | 6b | TPS15CT-6bR | GTTCCTAAATCATCTGCAAGCCT | SEQ ID 196 |
| TPS15CT | 7 | TPS15CT-7F | TTGAATAGAGGCGACGTTCC | SEQ ID 197 |
| TPS15CT | 7 | TPS15CT-7R | TGCTGTTCTAGCCATATTTTTGC | SEQ ID 198 |
| TPS16CC | 1 | TPS16CC-1F | TCTAGTCAAGTGTTAGCTTCATCTC | SEQ ID 199 |
| TPS16CC | 1 | TPS16CC-1R | TTTGTTGTTGGTCGAATGATGT | SEQ ID 200 |
| TPS16CC | 2 | TPS16CC-2F | AGGGACAAGTTGAAGAATTGAAAGA | SEQ ID 201 |
| TPS16CC | 2 | TPS16CC-2R | CATGGTTGGAGTAGTAGTAGTGT | SEQ ID 202 |
| TPS16CC | 3a | TPS16CC-3aF | GAGAGTGGTAAGTTTAAGGAAAGC | SEQ ID 203 |
| TPS16CC | 3a | TPS16CC-3aR | CCTAGCATAAAGCCTCACTAGG | SEQ ID 204 |
| TPS16CC | 3b | TPS16CC-3bF | GGCTCTTGCTTTCACTACCACC | SEQ ID 205 |
| TPS16CC | 3b | TPS16CC-3bR | CCTCACTAGGGTTTTTCTCAAAGG | SEQ ID 206 |
| TPS16CC | 4 | TPS16CC-4F | GGTGGAAAGAATTAGACTTGGC | SEQ ID 207 |
| TPS16CC | 4 | TPS16CC-4R | ATGTCCCACCTGAGAATTGC | SEQ ID 208 |
| TPS16CC | 5 | TPS16CC-5F | ACTTAGTCCAGATTATTTGAAGACATATT | SEQ ID 209 |
| TPS16CC | 5 | TPS16CC-5R | TGCATAGTGAAGTTTGTATCTCTCT | SEQ ID 210 |
| TPS16CC | 6 | TPS16CC-6F | TTGAGACCTCTTTTGTTGGAATGC | SEQ ID 211 |
| TPS16CC | 6 | TPS16CC-6R | AAAATCTTTGGTTGTGTAGAGAGC | SEQ ID 212 |
| TPS16CC | 7a | TPS16CC-7aF | ATGGTGTATCGGAACAAGAGG | SEQ ID 213 |
| TPS16CC | 7a | TPS16CC-7aR | AACGCAGCAACACTGTCC | SEQ ID 214 |
| TPS16CC | 7b | TPS16CC-7bF | AAGTGCTTGACATTATCTACAAAGAAGG | SEQ ID 215 |
| TPS16CC | 7b | TPS16CC-7bR | TAATGGGATGGGATCTATAAGCAACGC | SEQ ID 216 |
| TPS17JL | 1a | TPS17JL-1aF | ATGGCTTTTCACCAATTTGCTCC | SEQ ID 217 |
| TPS17JL | 1a | TPS17JL-1aR | TCGTAGAACTAGGGTTATCGACC | SEQ ID 218 |
| TPS17JL | 1b | TPS17JL-1bF | TTTGCTCCATCATCATCCCTCCC | SEQ ID 219 |
| TPS17JL | 1b | TPS17JL-1bR | GAGGTCCATAGTTGGCTGATCTTCG | SEQ ID 220 |
| TPS17JL | 2 | TPS17JL-2F | TTGAAGAAAGAAGTGACAAGAATGG | SEQ ID 221 |
| TPS17JL | 2 | TPS17JL-2R | GGTAAGATATTCCAAGCCTTTGC | SEQ ID 222 |
| TPS17JL | 4a | TPS17JL-4aF | TACATGGAGAAAATGGAGAATGAGG | SEQ ID 223 |
| TPS17JL | 4a | TPS17JL-4aR | TGAAGCGGAAGCTCGAAAGC | SEQ ID 224 |
| TPS17JL | 4b | TPS17JL-4bF | ATCACGCTTTCGAGCTTCCG | SEQ ID 225 |
| TPS17JL | 4b | TPS17JL-4bR | AAATCTTCTTGGTGTGTTGATTGC | SEQ ID 226 |
| TPS17JL | 5 | TPS17JL-5F | TTGCTAGAGATAGATTGATGGAAGC | SEQ ID 227 |
| TPS17JL | 5 | TPS17JL-5R | AAAGCTCTAATTCCTCCAAAGTTCC | SEQ ID 228 |
| TPS17JL | 6 | TPS17JL-6F | GTTACCAGATTACATGAAGATGCC | SEQ ID 229 |
| TPS17JL | 6 | TPS17JL-6R | ACTAATACATCGAACCCCATCTC | SEQ ID 230 |
| TPS17JL | 7 | TPS17JL-7F | AGTTGGGTTGGCTTTCAATAGG | SEQ ID 231 |
| TPS17JL | 7 | TPS17JL-7R | ATGTTCCTAAATCATCTGCAAGC | SEQ ID 232 |
| TPS17JL | 8 | TPS17JL-8F | TAGAGGCGACGTTCCTAAATCG | SEQ ID 233 |
| TPS17JL | 8 | TPS17JL-8R | TGCTGTTCTAGCCATATTTTTGC | SEQ ID 234 |
| TPS18JL | 1 | TPS18JL-1F | TCTAGTCAAGTGTTAGCTTCATCTC | SEQ ID 235 |
| TPS18JL | 1 | TPS18JL-1R | TGTTGTTGGTCGAATGATGTTTTG | SEQ ID 236 |
| TPS18JL | 2 | TPS18JL-2F | AAGAAGTTGTTAGGAAAGAGATATTCC | SEQ ID 237 |
| TPS18JL | 2 | TPS18JL-2R | AGATGAAATGTTAAATCCATGTTGTCG | SEQ ID 238 |
| TPS18JL | 3a | TPS18JL-3aF | TGAGAGTGGTAAGTTTAAGGAAAGC | SEQ ID 239 |
| TPS18JL | 3a | TPS18JL-3aR | GGTGGTAGTGAAAGCAAGAGC | SEQ ID 240 |
| TPS18JL | 3b | TPS18JL-3bF | GGCTCTTGCTTTCACTACCACC | SEQ ID 241 |
| TPS18JL | 3b | TPS18JL-3bR | CCTCACTAGGGTTTTTCTCAAAGG | SEQ ID 242 |
| TPS18JL | 3c | TPS18JL-3cF | TGAGAAAAACCCTAGTGAGGC | SEQ ID 243 |
| TPS18JL | 3c | TPS18JL-3cR | TTGTAGTAGATTGAAGTCCAACTTTGC | SEQ ID 244 |
| TPS18JL | 4 | TPS18JL-4F | TTAGACTTGGCAAACAAACTACC | SEQ ID 245 |
| TPS18JL | 4 | TPS18JL-4R | TATGTCCCACCTGAGAATTGC | SEQ ID 246 |
| TPS18JL | 5 | TPS18JL-5F | ACTTAGTCCAGATTATTTGAAGACATATTA | SEQ ID 247 |
| TPS18JL | 5 | TPS18JL-5R | TTGCATAGTGAAGTTTGTATCTCTCT | SEQ ID 248 |
| TPS18JL | 6a | TPS18JL-6aF | TTCCATGAAGCACAATGGTTGA | SEQ ID 249 |
| TPS18JL | 6a | TPS18JL-6aR | GCATTCCAACAAAAGAGGTCTCA | SEQ ID 250 |
| TPS18JL | 6b | TPS18JL-6bF | GGTTACCCAATGTTGATTGAGACC | SEQ ID 251 |
| TPS18JL | b | TPS18JL-6bR | GGTTGTGTAGAGAGCCATTCAAATA | SEQ ID 252 |
| TPS18JL | 7 | TPS18JL-7F | TGGTGTATCGGAACAAGAGGC | SEQ ID 253 |
| TPS18JL | 7 | TPS18JL-7R | CAACGCAGCAACACTGTCC | SEQ ID 254 |
| TPS18VF | 1 | TPS18VF-1F | ACGCATCTTTTCGTCCCTTT | SEQ ID 255 |
| TPS18VF | 1 | TPS18VF-1R | TGAGATCACCGTTACTCCTGATA | SEQ ID 256 |
| TPS18VF | 2 | TPS18VF-2F | AGCAGACCCATTTGATGAAGG | SEQ ID 257 |
| TPS18VF | 2 | TPS18VF-2R | CAGCAGGAACGAAGAGACCG | SEQ ID 258 |
| TPS18VF | 3a | TPS18VF-3aF | TCGACACAAGGCTAAGAGAGG | SEQ ID 259 |
| TPS18VF | 3a | TPS18VF-3aR | GTCCTTGGCTGTGAACTTGG | SEQ ID 260 |
| TPS18VF | 3b | TPS18VF-3bF | CAAGTTCACAGCCAAGGACC | SEQ ID 261 |
| TPS18VF | 3b | TPS18VF-3bR | TTATCAATTTCCATTCTATGCAGGG | SEQ ID 262 |
| TPS18VF | 4 | TPS18VF-4F | GGTGGCGAGACATTGGTTTAGC | SEQ ID 263 |
| TPS18VF | 4 | TPS18VF-4R | ATGGATTTTGTAAGCGCAACCC | SEQ ID 264 |
| TPS18VF | 5 | TPS18VF-5F | TGCTATACAAAAACTTCCAGACTCC | SEQ ID 265 |
| TPS18VF | 5 | TPS18VF-5R | TGTAAAGGGCTCCATCCACG | SEQ ID 266 |
| TPS18VF | 6a | TPS18VF-6aF | GGGCAAGTTTGTGCGAAGC | SEQ ID 267 |
| TPS18VF | 6a | TPS18VF-6aR | TGGCACTACCAAAGTCATCCC | SEQ ID 268 |
| TPS18VF | 6b | TPS18VF-6bF | ATGGTGTGGTCAGCTCAGG | SEQ ID 269 |
| TPS18VF | 6b | TPS18VF-6bR | TGGCACTACCAAAGTCATCCC | SEQ ID 270 |
| TPS18VF | 7a | TPS18VF-7aF | AGAATCAAGAAGGACATGACGG | SEQ ID 271 |
| TPS18VF | 7a | TPS18VF-7aR | TTTGTTGAGGCACTTCCATGC | SEQ ID 272 |
| TPS18VF | 7b | TPS18VF-7bF | AAGTGCCTCAACAAAGAATGC | SEQ ID 273 |
| TPS18VF | 7b | TPS18VF-7bR | GTTCTTCCAAGTGGGGTAGG | SEQ ID 274 |
| TPS19BL | 1 | TPS19BL-1F | ATGGCGTTGTCAATAATGTCTTCTTACG | SEQ ID 275 |
| TPS19BL | 1 | TPS19BL-1R | GAGAACTCGAAAGTGATGAGGAGG | SEQ ID 276 |
| TPS19BL | 2a | TPS19BL-2aF | AGCAGACCCATTTGATGAAGG | SEQ ID 277 |
| TPS19BL | 2a | TPS19BL-2aR | AGCAGGAACGAAGTGACCG | SEQ ID 278 |
| TPS19BL | 2b | TPS19BL-2bF | GATAAATACAGGGACGTTTTAAGAAAAGC | SEQ ID 279 |
| TPS19BL | 2b | TPS19BL-2bR | CCTCGAAGATATAGTCAATTCCTAGC | SEQ ID 280 |
| TPS19BL | 3 | TPS19BL-3F | ATATGAAGCCTCCCATCTATGC | SEQ ID 281 |
| TPS19BL | 3 | TPS19BL-3R | CCATTCTCACTGGGATAGACACC | SEQ ID 282 |
| TPS19BL | 4 | TPS19BL-4F | GGTGGCGAGACATTGGTTTAGC | SEQ ID 283 |
| TPS19BL | 4 | TPS19BL-4R | ATGGATTTTGTAAGCGCAACCC | SEQ ID 284 |
| TPS19BL | 5a | TPS19BL-5aF | AGAAAAACTTCCAGACTCCATGA | SEQ ID 285 |
| TPS19BL | 5a | TPS19BL-5aR | GCTCCATCCACGCTTTTGAT | SEQ ID 286 |
| TPS19BL | 5b | TPS19BL5bF | TCAATGAGTCTAGCCATACGATCT | SEQ ID 287 |
| TPS19BL | 5b | TPS19BL-5bR | TGTAAAGGGCTCCATCCACG | SEQ ID 288 |
| TPS19BL | 6 | TPS19BL-6F | GGGCAAGTTTGTGCGAAGC | SEQ ID 289 |
| TPS19BL | 6 | TPS19BL-6R | TGGCACTACCAAAGTCATCCC | SEQ ID 290 |
| TPS19BL | 7a | TPS19BL-7aF | GGACATGACGGATCTTATGTGG | SEQ ID 291 |
| TPS19BL | 7a | TPS19BL-7aR | TTGTTGAGGCACTTCCATGC | SEQ ID 292 |
| TPS19BL | 7b | TPS19BL-7bF | ATCCAGCGTTTCCACCACC | SEQ ID 293 |
| TPS19BL | 7b | TPS19BL-7bR | GTTCTTCCAAGTGGGGTAGGC | SEQ ID 294 |
| TPS1JL | 1 | TPS1JL-1F | ACCAATTTGCTTCATCATCATCCC | SEQ ID 295 |
| TPS1JL | 1 | TPS1JL-1R | AAATGGGAGGTCCATAGTTGGC | SEQ ID 296 |
| TPS1JL | 2 | TPS1JL-2F | TGAAAAGGATGCTAATTGGAGTGG | SEQ ID 297 |
| TPS1JL | 2 | TPS1JL-2R | CGTAGAAGCCTAAATTGGAGAGC | SEQ ID 298 |
| TPS1JL | 3 | TPS1JL-3F | ATCACAAGACAGGAGAGTTCAAGGC | SEQ ID 299 |
| TPS1JL | 3 | TPS1JL-3R | ATTCTCCATTGAAGTGGCATCTCC | SEQ ID 300 |
| TPS1JL | 4a | TPS1JL-4aF | ACTTGGAGAGAAATTGCCTTTCG | SEQ ID 301 |
| TPS1JL | 4a | TPS1JL-4aR | TCCAATGTTCCATAAATGTCATGC | SEQ ID 302 |
| TPS1JL | 4b | TPS1JL-4bF | GCAAGTTGGAGTAAGATTTGAGC | SEQ ID 303 |
| TPS1JL | 4b | TPS1JL-4bR | ATTAGTGAAAAGTTGTAGTTCCTCC | SEQ ID 304 |
| TPS1JL | 5 | TPS1JL-5F | TAAGTTACCAGATTATATGAAGACAGC | SEQ ID 305 |
| TPS1JL | 5 | TPS1JL-5R | TTTGTGAAATTGTATGTAAAGTAGAAAGC | SEQ ID 306 |
| TPS1JL | 6 | TPS1JL-6F | AGAATGGATGGTTGTCTGTGGG | SEQ ID 307 |
| TPS1JL | 6 | TPS1JL-6R | GGCGAACTATGTTAGGATGACC | SEQ ID 308 |
| TPS1JL | 7 | TPS1JL-7F | CAATTCAATGTTATATGCACGATACTGG | SEQ ID 309 |
| TPS1JL | 7 | TPS1JL-7R | CTGAGAAGCATGTCCATCGCC | SEQ ID 310 |
| TPS20CT | 1 | TPS20CT-1F | ATTCAAGTCTTAGCTTCATCTCAATTA | SEQ ID 311 |
| TPS20CT | 1 | TPS20CT-1R | CGATCACCCCAAATAGAAGGGT | SEQ ID 312 |
| TPS20CT | 2 | TPS20CT-2F | TTTGAGAGTGAAATTGAGAAATTGTTGG | SEQ ID 313 |
| TPS20CT | 2 | TPS20CT-2R | TAAATCCATGTTGTCTTAATAATCTAAACC | SEQ ID 314 |
| TPS20CT | 3a | TPS20CT-3aF | GCCTAATAACCGATGTTCCAGG | SEQ ID 315 |
| TPS20CT | 3a | TPS20CT-3aR | GAGATGTAAAACCTAGCATGAAGCC | SEQ ID 316 |
| TPS20CT | 3b | TPS20CT-3bF | AGACCATAGAGAGGCTTCATGC | SEQ ID 317 |
| TPS20CT | 3b | TPS20CT-3bR | CGTAATTTCACTAAGTTCCTTTTTGTGG | SEQ ID 318 |
| TPS20CT | 4 | TPS20CT-4F | GGTGGAAGGAGCATGAGTTTGC | SEQ ID 319 |
| TPS20CT | 4 | TPS20CT-4R | ACCTTTGAATTGCTTTGGTAAGAAGC | SEQ ID 320 |
| TPS20CT | 6 | TPS20CT-6F | GAGTCTCTTATGTTTCTTCTGGTAACG | SEQ ID 321 |
| TPS20CT | 6 | TPS20CT-6R | CATGAACCTAGAAAGGAGAGTAGAAGC | SEQ ID 322 |
| TPS20CT | 7a | TPS20CT-7aF | TGAGCAAAAGAGAAATCACATACC | SEQ ID 323 |
| TPS20CT | 7a | TPS20CT-7aR | TTTCTTTCCAGTGGGTGTCC | SEQ ID 324 |
| TPS20CT | 7b | TPS20CT-7bF | CCAGCAGTTGTGCCCTTTCC | SEQ ID 325 |
| TPS20CT | 7b | TPS20CT-7bR | CAATGCTTTCTTTGAGCACTTTTCC | SEQ ID 326 |
| TPS20JL | 1 | TPS20JL-1F | TCAAGTCTTAGCTTCATCTCAATTATGTG | SEQ ID 327 |
| TPS20JL | 1 | TPS20JL-1R | GATCACCCCAAATAGAAGGGT | SEQ ID 328 |
| TPS20JL | 2 | TPS20JL-2F | TTCGAGAGTGAAATCGAGAAATTATTGG | SEQ ID 329 |
| TPS20JL | 2 | TPS20JL-2R | ATCCACTTTGTCTTAATAGTCTAAACCG | SEQ ID 330 |
| TPS20JL | 3a | TPS20JL-3aF | CTTGCTTTCACAACCACTCACC | SEQ ID 331 |
| TPS20JL | 3a | TPS20JL-3aR | CCTCTCTATGGTCTTTCTTAGAGGC | SEQ ID 332 |
| TPS20JL | 3b | TPS20JL-3bF | ATAACCGATGTTTCAGGTTTGC | SEQ ID 333 |
| TPS20JL | 3b | TPS20JL-3bR | TAAGGTGAGTGGTTGTGAAAGC | SEQ ID 334 |
| TPS20JL | 4 | TPS20JL-4F | GTGTATATTATGAACCCAAATACTCTCG | SEQ ID 335 |
| TPS20JL | 4 | TPS20JL-4R | CCTTTGAATTGCTTTGGTAAGAAGC | SEQ ID 336 |
| TPS20JL | 6 | TPS20JL-6F | GAACTATTGGAGGTTATTTTGAAGAAGC | SEQ ID 337 |
| TPS20JL | 6 | TPS20JL-6R | GAGTGGAAGCTGAAACAATCTTAGGG | SEQ ID 338 |
| TPS20JL | 7 | TPS20JL-7F | TGAGCAAGAGAGAAATCACATACC | SEQ ID 339 |
| TPS20JL | 7 | TPS20JL-7R | AGAACACGAAGTAAGATAGGAAAAGG | SEQ ID 340 |
| TPS23JL | 1 | TPS23JL-1F | CACACAAATCTTAGTATCATTATCTTCAAA | SEQ ID 341 |
| TPS23JL | 1 | TPS23JL-1R | CAAATCTTGTTGTGAAATGTTGTAATGT | SEQ ID 342 |
| TPS23JL | 2 | TPS23JL-2F | TGTCAACAACAAAAGGTTGAGG | SEQ ID 343 |
| TPS23JL | 2 | TPS23JL-2R | TCAAAATGATAAGACAATCCCAAACG | SEQ ID 344 |
| TPS23JL | 3a | TPS23JL-3aF | GAACACCATGAAGACGATGATCC | SEQ ID 345 |
| TPS23JL | 3a | TPS23JL-3aR | TGCTGACTTCACTAAGCTCC | SEQ ID 346 |
| TPS23JL | 3b | TPS23JL-3bF | TGCTTGGTAAGTGATACCCTTGG | SEQ ID 347 |
| TPS23JL | 3b | TPS23JL-3bR | AGGGCCTCTCTAGGGCTCG | SEQ ID 348 |
| TPS23JL | 4 | TPS23JL-4F | TGCAAGAGATAGGATTGTGGAATTG | SEQ ID 349 |
| TPS23JL | 4 | TPS23JL-4R | ACTCAAGTTCTTCAAGTGTACCATA | SEQ ID 350 |
| TPS23JL | 5 | TPS23JL-5F | TTGTTATGAAGAGTTTGAGCAACTG | SEQ ID 351 |
| TPS23JL | 5 | TPS23JL-5R | ACTCTGTATGTTTCTTCTTTTTCTAGCAG | SEQ ID 352 |
| TPS23JL | 6 | TPS23JL-6F | TTTGAATGAAGCTCGATGTTTGC | SEQ ID 353 |
| TPS23JL | 6 | TPS23JL-6R | CCATTAGCCTACAAATAGTAACAGATGC | SEQ ID 354 |
| TPS23JL | 7a | TPS23JL-7aF | GCGTTTGTGAAGAGGAAGCC | SEQ ID 355 |
| TPS23JL | 7a | TPS23JL-7aR | ACCCTTGAAAAGTTAAGAGCACG | SEQ ID 356 |
| TPS23JL | 7b | TPS23JL-7bF | AGAAATAAATGAAGAGTTTTTGAAGCC | SEQ ID 357 |
| TPS23JL | 7b | TPS23JL-7bR | TGGATGAATAAGCAAAGCAGC | SEQ ID 358 |
| TPS24JL | 10a | TPS24JL-10aF | GCTCAAGTCTATGTTGAAGGAAGC | SEQ ID 359 |
| TPS24JL | 10a | TPS24JL-10aR | AACATCCTCAGAAAGCATAGGTCC | SEQ ID 360 |
| TPS24JL | 10b | TPS24JL-10bF | TCAATGGTTGAAATACGAGACCG | SEQ ID 361 |
| TPS24JL | 10b | TPS24JL-10bR | ATCGTTGAGAAGTCGTCCG | SEQ ID 362 |
| TPS24JL | 11 | TPS24JL-11F | CGCGTGGTTTTGGCTCTGG | SEQ ID 363 |
| TPS24JL | 11 | TPS24JL-11R | GGTGAATCCGTCGTCATTGGC | SEQ ID 364 |
| TPS24JL | 1 | TPS24JL-1F | TGCATTCCAACATTAGGTGCTC | SEQ ID 365 |
| TPS24JL | 1 | TPS24JL-1R | TGCTTTTCCTTGCACCATTTAGT | SEQ ID 366 |
| TPS24JL | 2a | TPS24JL-2aF | TTATGACACTGCCTGGGTGG | SEQ ID 367 |
| TPS24JL | 2a | TPS24JL-2aR | GAGGAAGACCCCATGAACCG | SEQ ID 368 |
| TPS24JL | 2b | TPS24JL-2bF | AGAGAATCAGCACTCTGACGG | SEQ ID 369 |
| TPS24JL | 2b | TPS24JL-2bR | CACCCCATCGCTTCATTGC | SEQ ID 370 |
| TPS24JL | 4 | TPS24JL-4F | TCAGGAAGCTACTCAGAGGG | SEQ ID 371 |
| TPS24JL | 4 | TPS24JL-4R | ACAGAGAACCATTTTTCCTTTGG | SEQ ID 372 |
| TPS24JL | 5 | TPS24JL-5F | TATGCTCGTCTCTCAATGGTGG | SEQ ID 373 |
| TPS24JL | 5 | TPS24JL-5R | AGAACACACTCCTCTCCTTGC | SEQ ID 374 |
| TPS24JL | 6 | TPS24JL-6F | TCCGAGATCATCATACACCCA | SEQ ID 375 |
| TPS24JL | 6 | TPS24JL-6R | TCTCCCCTAGTTGAAATGCTGT | SEQ ID 376 |
| TPS24JL | 7 | TPS24JL-7F | GAAAACTTCATATTGTTCCTCAAATGTTCG | SEQ ID 377 |
| TPS24JL | 7 | TPS24JL-7R | GAGTTCTTCACGGTGTATTGATTGG | SEQ ID 378 |
| TPS24JL | 8a | TPS24JL-8aF | GTGGGTTGTAGAGAATAGGTTGG | SEQ ID 379 |
| TPS24JL | 8a | TPS24JL-8aR | GCGGGCATCAGATAATTCAGG | SEQ ID 380 |
| TPS24JL | 8b | TPS24JL-8bF | CCTGAATTATCTGATGCCCGC | SEQ ID 381 |
| TPS24JL | 8b | TPS24JL-8bR | CTAGTTCCTCTTCTGAACCTCC | SEQ ID 382 |
| TPS24JL | 9 | TPS24JL-9F | CAGTGTTGATTGTTTGTCGGAGC | SEQ ID 383 |
| TPS24JL | 9 | TPS24JL-9R | TTGTCACACTACGTCCTTGC | SEQ ID 384 |
| TPS2FN | 1a | TPS2FN-1aF | AAGATCAGCCAACTATGATCCTCCC | SEQ ID 385 |
| TPS2FN | 1a | TPS2FN-1aR | ATGGAAGAGACTGAATGAAATCAAAAGACC | SEQ ID 386 |
| TPS2FN | 1b | TPS2FN-1bF | TTAGAAGATCAGCCAACTATGATCC | SEQ ID 387 |
| TPS2FN | 1b | TPS2FN-1bR | GAATGAAATCAAAAGACCAAATGGG | SEQ ID 388 |
| TPS2FN | 2 | TPS2FN-2F | AAAGAAGAAGTGAAAAAGATGTTAGTTGG | SEQ ID 389 |
| TPS2FN | 2 | TPS2FN-2R | AAAAGCCTAAATTCGAGAGCAGTGG | SEQ ID 390 |
| TPS2FN | 3a | TPS2FN-3aF | GAGACGGGAAAGTTCAAAGCG | SEQ ID 391 |
| TPS2FN | 3a | TPS2FN-3aR | TGAAGTGGCATCTCCAAGGC | SEQ ID 392 |
| TPS2FN | 3b | TPS2FN-3bF | CGCAAATTCAAGCAAAGTGC | SEQ ID 394 |
| TPS2FN | 3b | TPS2FN-3bF | GCTTCATTCTATGTGAAAAATGGCG | SEQ ID 393 |
| TPS2FN | 4a | TPS2FN-4aF | AAATGGTTTATGCTAGAGATAGATTGG | SEQ ID 395 |
| TPS2FN | 4a | TPS2FN-4aR | CTTGCAGATATTCTCCTAAAGTGGC | SEQ ID 396 |
| TPS2FN | 4b | TPS2FN-4bF | AGAGGCTTTTCTATGGCAGG | SEQ ID 397 |
| TPS2FN | 4b | TPS2FN-4bR | AAGCTCTAATTCTTCCAATGTTCC | SEQ ID 398 |
| TPS2FN | 5a | TPS2FN-5aF | TGCCTTTCTTTACTTTATTTAACACCG | SEQ ID 399 |
| TPS2FN | 5a | TPS2FN-5aR | GCTCTTCTAACACATCATACGCC | SEQ ID 400 |
| TPS2FN | 5b | TPS2FN-5bF | ACACCGTAAATGAAATGGCG | SEQ ID 401 |
| TPS2FN | 5b | TPS2FN-5bR | CGAGTTCTTGAGGTATTCAACGC | SEQ ID 402 |
| TPS2FN | 6a | TPS2FN-6aF | TGGGCAGAGTTATGTAGATGC | SEQ ID 403 |
| TPS2FN | 6a | TPS2FN-6aR | TCCTATTGAAAGCGAGGCG | SEQ ID 404 |
| TPS2FN | 6b | TPS2FN-6bF | ACGCCTCGCTTTCAATAGG | SEQ ID 405 |
| TPS2FN | 6b | TPS2FN-6bR | CTGCAAGTCGTAACATCAAGG | SEQ ID 406 |
| TPS2FN | 6c | TPS2FN-6cF | TGGAAGAGGCAAAATGGTTTTATAGC | SEQ ID 407 |
| TPS2FN | 6c | TPS2FN-6cR | GATCATCTGCAAGTCGTAACATCAAGG | SEQ ID 408 |
| TPS2FN | 7a | TPS2FN-7aF | AAAGAGGTGACATTCTTAAATCGG | SEQ ID 409 |
| TPS2FN | 7a | TPS2FN-7aR | AGTTATATTCATCTTCATCATTCATCTCC | SEQ ID 410 |
| TPS2FN | 7b | TPS2FN-7bF | GGTGTTTCTGAAGATGAAGCTCG | SEQ ID 411 |
| TPS2FN | 7b | TPS2FN-7bR | CTGAAATACGTTTCCTTGAATGGC | SEQ ID 412 |
| TPS30JL | 2 | TPS30JL-2F | TCTCGAAGATCAGCAAACTATCAACC | SEQ ID 413 |
| TPS30JL | 2 | TPS30JL-2R | ACATAATCAAATTGCCAAAGTGGG | SEQ ID 414 |
| TPS30JL | 4a | TPS30JL-4aF | AGACTTGGAATCTCTTATCACTTTGAG | SEQ ID 415 |
| TPS30JL | 4a | TPS30JL-4aR | GGCATACACATTATTTTTGTTGGTGTT | SEQ ID 416 |
| TPS30JL | 4b | TPS30JL-4bF | GTACAACACCAACAAAAATAATGTGT | SEQ ID 417 |
| TPS30JL | 4b | TPS30JL-4bR | TCGTAGGAGTCTAAATTCAAGAGAA | SEQ ID 418 |
| TPS30JL | 5 | TPS30JL-5F | GAGGCAATTTTATGGTGTGTACC | SEQ ID 419 |
| TPS30JL | 5 | TPS30JL-5R | TTGTTTTGTGTCTTGTCTCTTCC | SEQ ID 420 |
| TPS30JL | 6 | TPS30JL-6F | TGGGAAAGCACTGATATGGG | SEQ ID 421 |
| TPS30JL | 6 | TPS30JL-6R | AGCTCCAATTCATCTAGTGTACC | SEQ ID 422 |
| TPS30JL | 7 | TPS30JL-7F | TGGGACATTAGTGCTATGGATGG | SEQ ID 423 |
| TPS30JL | 7 | TPS30JL-7R | TCTGAAGGAATTTTATTATATGGAGGC | SEQ ID 424 |
| TPS30JL | 8 | TPS30JL-8F | AGATTTGAAGAGTACATTGAGAATGC | SEQ ID 425 |
| TPS30JL | 8 | TPS30JL-8R | CGATGAATGTCGTATTATGGTAGGG | SEQ ID 426 |
| TPS30JL | 9 | TPS30JL-9F | AGAGGAAGCTCGTCAACGTAT | SEQ ID 427 |
| TPS30JL | 9 | TPS30JL-9R | ATGTGCCATTCTACCAAGGTT | SEQ ID 428 |
| TPS30-likeJL | 1 | TPS30-likeJL-1F | GACTTGGAATCTCTTACCACTTTGA | SEQ ID 429 |
| TPS30-likeJL | 1 | TPS30-likeJL-1R | ACCATGTTGTCTTAGGAGTCTAAAT | SEQ ID 430 |
| TPS30-likeJL | 2 | TPS30-likeJL-2F | GAATAGTTCTCGAAGATCAGCAAAC | SEQ ID 431 |
| TPS30-likeJL | 2 | TPS30-likeJL-2R | CAAATTGCCAAAGTGGGGGT | SEQ ID 432 |
| TPS30-likeJL | 3 | TPS30-likeJL-3F | GCAAAGACTTGGAATCTCTTACCA | SEQ ID 433 |
| TPS30-likeJL | 3 | TPS30-likeJL-3R | GAGACACCGGATAACCATGTTG | SEQ ID 434 |
| TPS30-likeJL | 4 | TPS30-likeJL-4F | GAGGCAATTTTATGGTGTCTTCC | SEQ ID 435 |
| TPS30-likeJL | 4 | TPS30-likeJL-4R | TGTTGTGTGTCTTGTCTCTTCC | SEQ ID 436 |
| TPS30-likeJL | 5 | TPS30-likeJL-5F | GTGGGAAAGCACTGGTATGG | SEQ ID 437 |
| TPS30-likeJL | 5 | TPS30-likeJL-5R | AGCTCCAATTCATCTAGTGTACC | SEQ ID 438 |
| TPS30-likeJL | 6 | TPS30-likeJL-6F | TTAGTGCTATGGATGGGCTCC | SEQ ID 439 |
| TPS30-likeJL | 6 | TPS30-likeJL-6R | CGATTTCTGAAGGACTTTTATTATATGG | SEQ ID 440 |
| TPS30-likeJL | 7 | TPS30-likeJL-7F | AGAGAAGCAAGATGGTATTATGATGG | SEQ ID 441 |
| TPS30-likeJL | 7 | TPS30-likeJL-7R | CGATGAATGTCGTATTATGGTAGGG | SEQ ID 442 |
| TPS30-likeJL | 8a | TPS30-likeJL-8aF | TGGCGTGTCTGAAGAAGAAGC | SEQ ID 443 |
| TPS30-likeJL | 8a | TPS30-likeJL-8aR | AACATTGGAGAGTAGTCATCACC | SEQ ID 444 |
| TPS30-likeJL | 8b | TPS30-likeJL-8bF | CATGATGGTGATGACTACTCTCC | SEQ ID 445 |
| TPS30-likeJL | 8b | TPS30-likeJL-8bR | AGTACATGATCTTTTGTTTGGCG | SEQ ID 446 |
| TPS32JL | 1 | TPS32JL-1F | TGCAAAGAAGAACGAGTGAAGG | SEQ ID 447 |
| TPS32JL | 1 | TPS32JL-1R | TGTTTGTAGTAGTTTAGATCATGTTTTTCC | SEQ ID 448 |
| TPS32JL | 2 | TPS32JL-2F | ATAACCGATGTTTCGGGTTTGC | SEQ ID 449 |
| TPS32JL | 2 | TPS32JL-2R | CCTCTCTATGGTCTTTCTTAATGGC | SEQ ID 450 |
| TPS32JL | 3 | TPS32JL-3F | GAAAGCTAACAACCAAAATCTCTGC | SEQ ID 451 |
| TPS32JL | 3 | TPS32JL-3R | TTGCATGGCTTGGGTAAGAAGC | SEQ ID 452 |
| TPS32JL | 5 | TPS32JL-5F | AGAAGAAGCTCGATGGTTGAACG | SEQ ID 453 |
| TPS32JL | 5 | TPS32JL-5R | CATGAACCTAGCAAGTAGAGTGG | SEQ ID 454 |
| TPS32JL | 6 | TPS32JL-6F | GCCAACTGTTATGCCTTTCCC | SEQ ID 455 |
| TPS32JL | 6 | TPS32JL-6R | GGGATTGGATCTATAAGTAAAGCAGC | SEQ ID 456 |
| TPS33JL | 1 | TPS33JL-1F | ATGCTACCCCATCCAATGTGC | SEQ ID 457 |
| TPS33JL | 1 | TPS33JL-1R | AATATAATCGAAAGACCAAATGGAGGGC | SEQ ID 458 |
| TPS33JL | 2 | TPS33JL-2F | ATTAGTTGAGATGGAAAACTCTTTAGC | SEQ ID 459 |
| TPS33JL | 2 | TPS33JL-2R | ATAGCCATGTTGACGTAGAAGCC | SEQ ID 460 |
| TPS33JL | 3 | TPS33JL-3F | AGCTCCCACTTCATCGGAGG | SEQ ID 461 |
| TPS33JL | 3 | TPS33JL-3R | TTTGGCTAACTCAAGCAACATAGG | SEQ ID 462 |
| TPS33JL | 4a | TPS33JL-4aF | AGACATACTAAACTTGGAGAGAAATTGA | SEQ ID 463 |
| TPS33JL | 4a | TPS33JL-4aR | TATTCCATAAGAAACATTCCATCAATCG | SEQ ID 464 |
| TPS33JL | 4b | TPS33JL-4bF | GGAGACATACTAAACTTGGAGAGA | SEQ ID 465 |
| TPS33JL | 4b | TPS33JL-4bR | GCTTTGGTGAAAAGCTCTAATTCAT | SEQ ID 466 |
| TPS33JL | 5 | TPS33JL-5F | AGTTACCAGAATACATGAAGATGCC | SEQ ID 467 |
| TPS33JL | 5 | TPS33JL-5R | TGAATGTTGATGGAGATTTCTTGG | SEQ ID 468 |
| TPS33JL | 6 | TPS33JL-6F | AAATGGTTGGATTTCAGTAGGAGC | SEQ ID 469 |
| TPS33JL | 6 | TPS33JL-6R | GAAAATCTCTTTAGTATTTGTAATTGTGCC | SEQ ID 470 |
| TPS33JL | 7 | TPS33JL-7F | AATTGAAAAGAGGTGATGCTCCG | SEQ ID 471 |
| TPS33JL | 7 | TPS33JL-7R | TTTGGATTGATTATCTTGAGAACTATGACC | SEQ ID 472 |
| TPS36JL | 1 | TPS36JL-1F | AAAGATCAACCAGCAGCAATCG | SEQ ID 473 |
| TPS36JL | 1 | TPS36JL-1R | GTGGGTTTGTAGTTTCCTGATCG | SEQ ID 474 |
| TPS36JL | 2 | TPS36JL-2F | AAGGAGAGTGAAAATCCTTTAGTTAAGC | SEQ ID 475 |
| TPS36JL | 2 | TPS36JL-2R | GAGTTTGAAATGAAGAGCAGTGGC | SEQ ID 476 |
| TPS36JL | 3 | TPS36JL-3F | AATGCCTTCAAAAACGAGCAAAAGG | SEQ ID 477 |
| TPS36JL | 3 | TPS36JL-3R | GTCATCAAGTATTGTTTGAGATGTTTGG | SEQ ID 478 |
| TPS36JL | 5 | TPS36JL-5F | TGGCATTGAAATATGAGGCGG | SEQ ID 479 |
| TPS36JL | 5 | TPS36JL-5R | GCTGAAGCTCATCTAGTGTACC | SEQ ID 480 |
| TPS36JL | 6 | TPS36JL-6F | ATAAATGAACTGGATCAGCTACCCG | SEQ ID 481 |
| TPS36JL | 6 | TPS36JL-6R | GATGGTGTGAATCCCATTTTCTTTGAGG | SEQ ID 482 |
| TPS36JL | 7 | TPS36JL-7F | TTGGGGGATCTGTGTAAATGC | SEQ ID 483 |
| TPS36JL | 7 | TPS36JL-7R | CAGTTCCTGAGACACGTAAAATGG | SEQ ID 484 |
| TPS37FN | 1 | TPS37FN-1F | GCAGTGCATGGCTTTTCACC | SEQ ID 485 |
| TPS37FN | 1 | TPS37FN-1R | TCCAAATAGGGAGGGATGATGA | SEQ ID 486 |
| TPS37FN | 2 | TPS37FN-2F | ACAATGTACTGTGGTCGATAACCC | SEQ ID 487 |
| TPS37FN | 2 | TPS37FN-2R | AATGAAATCAAAAGACCAAATGGGAGG | SEQ ID 488 |
| TPS37FN | 3 | TPS37FN-3F | GAGAAAGACGTGAAAAGGATACTGG | SEQ ID 489 |
| TPS37FN | 3 | TPS37FN-3R | TCAAATCCATATTGGCGTAGAAGC | SEQ ID 490 |
| TPS37FN | 4 | TPS37FN-4F | AGCTTCATTCTATGGGAAAAAGGG | SEQ ID 491 |
| TPS37FN | 4 | TPS37FN-4R | TGAACCACCTAGCTTCCAACC | SEQ ID 492 |
| TPS37FN | 5 | TPS37FN-5F | GCAATCTAAACTTGGAGAAAAGAAAATGG | SEQ ID 493 |
| TPS37FN | 5 | TPS37FN-5R | TTTGTGAAAAGCTCTAATTCCTCC | SEQ ID 494 |
| TPS37FN | 7 | TPS37FN-7F | CATGCTTATTTTGCTTTCACAAATCCC | SEQ ID 495 |
| TPS37FN | 7 | TPS37FN-7R | TAGGTCATCTTCAAGTCGTAAAAGTATGG | SEQ ID 496 |
| TPS37FN | 8a | TPS37FN-8aF | GAGATGAAAAGAGGAGATGTTCCG | SEQ ID 497 |
| TPS37FN | 8a | TPS37FN-8aR | AAGCATGTCCATCACCATAAAGG | SEQ ID 498 |
| TPS37FN | 8b | TPS37FN-8bF | AAACATGGAAAGAGATGAATAAAGAAATGG | SEQ ID 499 |
| TPS37FN | 8b | TPS37FN-8bR | GAGAAGCATGTCCATCACCATAAAGG | SEQ ID 500 |
| TPS37JL | 1 | TPS37JL-1F | ATTCAAAGAACAACCGGAAGC | SEQ ID 501 |
| TPS37JL | 1 | TPS37JL-1R | AAAAATGAGCATCCCACAACG | SEQ ID 502 |
| TPS37JL | 2 | TPS37JL-2F | AAAGCTATGGGAAAAGAATCAATGAGC | SEQ ID 503 |
| TPS37JL | 2 | TPS37JL-2R | GGAGTTTGAAATGAAGAGCAGTGG | SEQ ID 504 |
| TPS37JL | 3 | TPS37JL-3F | GAGGCTTCATTCTATTCATTTAGGGG | SEQ ID 505 |
| TPS37JL | 3 | TPS37JL-3R | TCAACAGATTTAGTTTGACATTGCC | SEQ ID 506 |
| TPS37JL | 4 | TPS37JL-4F | TCTAGGTTGACAGAAAGGCTACC | SEQ ID 507 |
| TPS37JL | 4 | TPS37JL-4R | GTCCATGAGTGTTAGCAAGAGACC | SEQ ID 508 |
| TPS37JL | 5 | TPS37JL-5F | TATAAATGAATTGGATCAGCTACCCG | SEQ ID 509 |
| TPS37JL | 5 | TPS37JL-5R | TATAAAAAGCAACAAACAATATCTTCATGT | SEQ ID 510 |
| TPS37JL | 6a | TPS37JL-6aF | GTTGGGGGATCTGTGTAAATGC | SEQ ID 511 |
| TPS37JL | 6a | TPS37JL-6aR | AGTTGGATATTGAAGCAAGTGTTCC | SEQ ID 512 |
| TPS37JL | 6b | TPS37JL-6bF | TGTGTAAATGCTATATGGAGGAGGC | SEQ ID 513 |
| TPS37JL | 6b | TPS37JL-6bR | TCGAAAGACAGTTCCTGAGACACG | SEQ ID 514 |
| TPS37JL | 7 | TPS37JL-7F | TGCTACATGCGTGAAAAGGG | SEQ ID 515 |
| TPS37JL | 7 | TPS37JL-7R | AGTACCAAAGCCATCACCC | SEQ ID 516 |
| TPS38FN | 1 | TPS38FN-1F | TTAATATCATCATCACTACCTTGCATT | SEQ ID 517 |
| TPS38FN | 1 | TPS38FN-1R | GGACTAATAGATGTTTTTGGTGTGAA | SEQ ID 518 |
| TPS38FN | 2 | TPS38FN-2F | CAATGTACTGTGGTCAATAATAGTAGCC | SEQ ID 519 |
| TPS38FN | 2 | TPS38FN-2R | AATCGAAAGACCAAATCGGAGG | SEQ ID 520 |
| TPS38FN | 3 | TPS38FN-3F | ATAAGGGAGAATCCTATACAAGGC | SEQ ID 521 |
| TPS38FN | 3 | TPS38FN-3R | CCTAAATTCGAGAGCAATGGGG | SEQ ID 522 |
| TPS38FN | 4 | TPS38FN-4F | AGCATATTGGAGGAAGCTAGGG | SEQ ID 523 |
| TPS38FN | 4 | TPS38FN-4R | TCGATAAACCACTTGGCCTCC | SEQ ID 524 |
| TPS38FN | 5 | TPS38FN-5F | GATCTAAAACATTTGTCTAGGTGGTGG | SEQ ID 525 |
| TPS38FN | 5 | TPS38FN-5R | ATTCTCCTAAAGTAGCTGAAATCTGG | SEQ ID 526 |
| TPS38FN | 6 | TPS38FN-6F | TCGTGTTGTTGAGAGATGGG | SEQ ID 527 |
| TPS38FN | 6 | TPS38FN-6R | AAGTGTTTTTCTTTTAATACATCTAGTGCC | SEQ ID 528 |
| TPS38FN | 7 | TPS38FN-7F | TGGTTGGATTTCAGTAGGAGC | SEQ ID 529 |
| TPS38FN | 7 | TPS38FN-7R | ACGATCATGGCAGATTGACG | SEQ ID 530 |
| TPS38FN | 8 | TPS38FN-8F | CATAACGTATCTAAAGAGGAAGCTCG | SEQ ID 531 |
| TPS38FN | 8 | TPS38FN-8R | TGCAAAGTTTTTGGCATCATCAACC | SEQ ID 532 |
| TPS38JL | 1 | TPS38JL-1F | AAAGATCAACCAGCAGCAATCG | SEQ ID 533 |
| TPS38JL | 1 | TPS38JL-1R | GTGGGTTTGTAGTTTCCTGATCG | SEQ ID 534 |
| TPS38JL | 2a | TPS38JL-2aF | AAGCTATGGGAAAAGAATCAATGAGC | SEQ ID 535 |
| TPS38JL | 2a | TPS38JL-2aR | GAGTTTGAAATGAAGAGCAGTGG | SEQ ID 536 |
| TPS38JL | 2b | TPS38JL-2bF | AGGCTGAAAATCCTTTAGTTAAGC | SEQ ID 537 |
| TPS38JL | 2b | TPS38JL-2bR | GGACTGAATCCATATTGTCGAAGG | SEQ ID 538 |
| TPS38JL | 3 | TPS38JL-3F | TGCCTTCAAAAACGAGAAAAAGG | SEQ ID 539 |
| TPS38JL | 3 | TPS38JL-3R | AGTCTCTTGCTTCATCTAATATGGG | SEQ ID 540 |
| TPS38JL | 4 | TPS38JL-4F | TGCAGTGGCATTGAAATATGAGG | SEQ ID 541 |
| TPS38JL | 4 | TPS38JL-4R | GCTGAAGCTCATCTAGTGTACC | SEQ ID 542 |
| TPS38JL | 5 | TPS38JL-5F | ATAAATGAACTGGATCAGCTACCCG | SEQ ID 543 |
| TPS38JL | 5 | TPS38JL-5R | TATAAAAAGCAACAAACAATATCTTCATGT | SEQ ID 544 |
| TPS38JL | 6 | TPS38JL-6F | TGCTATATGGAGGAGGCAAAATGG | SEQ ID 545 |
| TPS38JL | 6 | TPS38JL-6R | TCGAAAAACAGTTCCTGAGACACG | SEQ ID 546 |
| TPS38JL | 7 | TPS38JL-7F | TGCTACATGCGTGAAAAGGG | SEQ ID 547 |
| TPS38JL | 7 | TPS38JL-7R | TGTGGTACATCTCCATTGCTCC | SEQ ID 548 |
| TPS39JL | 1 | TPS39JL-1F | TGGCTTTTCACCAATTTGCTCC | SEQ ID 549 |
| TPS39JL | 1 | TPS39JL-1R | AAATGGGAGGTCCATAGTTGGC | SEQ ID 550 |
| TPS39JL | 2 | TPS39JL-2F | TTGAAGAAAGAAGTGACAAGATGGC | SEQ ID 551 |
| TPS39JL | 2 | TPS39JL-2R | GGCGTAGAAGCCTAAATTCGC | SEQ ID 552 |
| TPS39JL | 3 | TPS39JL-3F | ACATGGAGAAAATGGAGAATGAGG | SEQ ID 553 |
| TPS39JL | 3 | TPS39JL-3R | CGCAACCTCGAAACAAGTCG | SEQ ID 554 |
| TPS39JL | 4 | TPS39JL-4F | AGGGGATTGTAAACTTGGTGG | SEQ ID 555 |
| TPS39JL | 4 | TPS39JL-4R | TTCTCTAAAATAGCTGAAATTCTCCTCG | SEQ ID 556 |
| TPS39JL | 5 | TPS39JL-5F | TGAGTTACCAGATTACATGAAGATGCC | SEQ ID 557 |
| TPS39JL | 5 | TPS39JL-5R | ACTAATACATCGAACCCCATCTCA | SEQ ID 558 |
| TPS39JL | 6 | TPS39JL-6F | ACAAGAAGCAAAATGGTATTATAGTGG | SEQ ID 559 |
| TPS39JL | 6 | TPS39JL-6R | TTTTGTTATAGGATTTGTGAAACAATAAGC | SEQ ID 560 |
| TPS39JL | 7 | TPS39JL-7F | ATAATGCTACCGAAGACGAAGC | SEQ ID 561 |
| TPS39JL | 7 | TPS39JL-7R | TCTGAGAACCATGTCCATCTCC | SEQ ID 562 |
| TPS3JL | 1 | TPS3JL-1F | AATCACTTTTGTAGATTTTTCACACC | SEQ ID 563 |
| TPS3JL | 1 | TPS3JL-1R | GTAATCGAAAGACCAAATCGGAGG | SEQ ID 564 |
| TPS3JL | 2 | TPS3JL-2F | AGAAAGAAGTGACAAGAATGCTCC | SEQ ID 565 |
| TPS3JL | 2 | TPS3JL-2R | AGCCATGTTGGCGTAGAAGC | SEQ ID 566 |
| TPS3JL | 3a | TPS3JL-3aF | TGCTTTCAAGGATAAGAGAGGG | SEQ ID 567 |
| TPS3JL | 3a | TPS3JL-3aR | TCTTCCTCATTCTCCATTTTCTCC | SEQ ID 568 |
| TPS3JL | 3b | TPS3JL-3bF | AATACATGGAGAAAATGGAGAATGAGG | SEQ ID 569 |
| TPS3JL | 3b | TPS3JL-3bR | CGCAAACTCGAACAAAGTCG | SEQ ID 570 |
| TPS3JL | 4 | TPS3JL-4F | TTTGCTAGAGATAGATTGATGGAAGC | SEQ ID 571 |
| TPS3JL | 4 | TPS3JL-4R | AAAAGCTCTAATTCCTCCAAAGTTCC | SEQ ID 572 |
| TPS3JL | 5 | TPS3JL-5F | ATCAATGAGTTACCAGATTACATGAAG | SEQ ID 573 |
| TPS3JL | 5 | TPS3JL-5R | ACTAATACATCGAACCCCATCTCAT | SEQ ID 574 |
| TPS3JL | 6 | TPS3JL-6F | ATACACTGAGTTGGGTTGGC | SEQ ID 575 |
| TPS3JL | 6 | TPS3JL-6R | TGTTCCTAAATCATCTGCAAGCC | SEQ ID 576 |
| TPS3JL | 7 | TPS3JL-7F | GAATTGAATAGAGGCGACGTTCC | SEQ ID 577 |
| TPS3JL | 7 | TPS3JL-7R | ATAGTGCTGTTCTAGCCATATTTTTGC | SEQ ID 578 |
| TPS40JL | 1a | TPS40JL-1aF | CAATGTACTGTGGTCAATAATAGTAGCC | SEQ ID 579 |
| TPS40JL | 1a | TPS40JL-1aR | AATCGAAAGACCAAATCGGAGG | SEQ ID 580 |
| TPS40JL | 1b | TPS40JL-1bF | ACTGTGGTCAATAATAGTAGCCC | SEQ ID 581 |
| TPS40JL | 1b | TPS40JL-1bR | TGAATGTAATCGAAAGACCAAATCGG | SEQ ID 582 |
| TPS40JL | 2 | TPS40JL-2F | AATATAAGGGAGAATCCTATACAAGGC | SEQ ID 583 |
| TPS40JL | 2 | TPS40JL-2R | ATAGCCATGTTGGCGTAGAAGC | SEQ ID 584 |
| TPS40JL | 3a | TPS40JL-3aF | TGAGAAAAATGGTGAAAGCATATTGG | SEQ ID 585 |
| TPS40JL | 3a | TPS40JL-3aR | TCCGTTCTTGCAGTCCTCC | SEQ ID 586 |
| TPS40JL | 3b | TPS40JL-3bF | GAGGACTGCAAGAACGGAGG | SEQ ID 587 |
| TPS40JL | 3b | TPS40JL-3bR | ACAAATGTTTTAGATCGTCTTGATGC | SEQ ID 588 |
| TPS40JL | 4 | TPS40JL-4F | TTTGTGAGAGATAGGTTGATGGGG | SEQ ID 589 |
| TPS40JL | 4 | TPS40JL-4R | AAAGCTCTAATTCTTCTAATGTTCCG | SEQ ID 590 |
| TPS40JL | 6 | TPS40JL-6F | ATGGTTGGATTTCAGTAGGAGC | SEQ ID 591 |
| TPS40JL | 6 | TPS40JL-6R | GTACGATCATGGCAGATTGACG | SEQ ID 592 |
| TPS40JL | 7 | TPS40JL-7F | ATGCAAGACCATAATGTATCTAAAGAGG | SEQ ID 593 |
| TPS40JL | 7 | TPS40JL-7R | TGCAAAGTTTTTGGCATCATCAACC | SEQ ID 594 |
| TPS41JL | 1 | TPS41JL-1F | TCAATGTACTGTAGTCGATAGTTCTAATCC | SEQ ID 595 |
| TPS41JL | 1 | TPS41JL-1R | GACCAAATGGATGGTTCATAGTTGC | SEQ ID 596 |
| TPS41JL | 2a | TPS41JL-2aF | TAGAAGTCGGGTGAAAGAGATCG | SEQ ID 597 |
| TPS41JL | 2a | TPS41JL-2aR | AGAAGTCTAAATTCAAGAGCAATGG | SEQ ID 598 |
| TPS41JL | 2b | TPS41JL-2bF | ATAGAAGTCGGGTGAAAGAGATCG | SEQ ID 599 |
| TPS41JL | 2b | TPS41JL-2bR | AAGCGATAAGATACTCCAAGTCTTTGC | SEQ ID 600 |
| TPS41JL | 3 | TPS41JL-3F | ACGAGACAGGAAAATTCAAGGC | SEQ ID 601 |
| TPS41JL | 3 | TPS41JL-3R | TCCTCCAATGAAGTGGGAGC | SEQ ID 602 |
| TPS41JL | 4 | TPS41JL-4F | GTGGAGGCATACTAAACTTGGG | SEQ ID 603 |
| TPS41JL | 4 | TPS41JL-4R | AAAAGCTCTAATTCATCCAATGTTCC | SEQ ID 604 |
| TPS41JL | 5 | TPS41JL-5F | ACCAGAATACATGAAGATGCCT | SEQ ID 605 |
| TPS41JL | 5 | TPS41JL-5R | TGTTGATGGAGATGTCTTTGTCTCT | SEQ ID 606 |
| TPS41JL | 6 | TPS41JL-6F | GTGGATAGATATGTGTAGAGGTTTTCT | SEQ ID 607 |
| TPS41JL | 6 | TPS41JL-6R | AAGAACTGGTGCTCCCACTG | SEQ ID 608 |
| TPS41JL | 7 | TPS41JL-7F | TGTTCGGATGAAATGAAAAGAGGC | SEQ ID 609 |
| TPS41JL | 7 | TPS41JL-7R | TGTGACGCTCTACCAAGATTTTTGC | SEQ ID 610 |
| TPS42JL | 1 | TPS42JL-1F | CAAATGTTCTGTGGTCCATAACCC | SEQ ID 611 |
| TPS42JL | 1 | TPS42JL-1R | GACCAAATGGGAGGTTCATAGTTTCC | SEQ ID 612 |
| TPS42JL | 2 | TPS42JL-2F | GAGAAAGATGTGAAAATGATGCTACTTGG | SEQ ID 613 |
| TPS42JL | 2 | TPS42JL-2R | TGAGGTACTACAAATCCATACTCCC | SEQ ID 614 |
| TPS42JL | 3 | TPS42JL-3F | GATGATGAAACAGGAGAGTTCAAGG | SEQ ID 615 |
| TPS42JL | 3 | TPS42JL-3R | GACATTTGGTTGTGAAAATTCTTGC | SEQ ID 616 |
| TPS42JL | 4 | TPS42JL-4F | TGGATCATGCTTTGGAAATGCC | SEQ ID 617 |
| TPS42JL | 4 | TPS42JL-4R | AGCTCTTCTTGATATGTTGATTGC | SEQ ID 618 |
| TPS42JL | 5a | TPS42JL-5aF | TGGTGGAAGCATTCTAAACTTGG | SEQ ID 619 |
| TPS42JL | 5a | TPS42JL-5aR | AGCATTAGCGAAGAGTTGTAGTTCC | SEQ ID 620 |
| TPS42JL | 5b | TPS42JL-5bF | AGTGTTTCATGTGGCAAGTTGG | SEQ ID 621 |
| TPS42JL | 5b | TPS42JL-5bR | AGCGAAGAGTTGTAGTTCCTCC | SEQ ID 622 |
| TPS42JL | 6 | TPS42JL-6F | GGGATTTGAAAGTAATAGATGAGTTACCG | SEQ ID 623 |
| TPS42JL | 6 | TPS42JL-6R | AGAAAGCCATCTTCATGTAATCCG | SEQ ID 624 |
| TPS42JL | 7 | TPS42JL-7F | AGTGGATACCAACCAACATTGC | SEQ ID 625 |
| TPS42JL | 7 | TPS42JL-7R | TGTTATGAGATTTGTAAAACAGAAATAAGC | SEQ ID 626 |
| TPS42JL | 8a | TPS42JL-8aF | GATGAAATGAAAAGAGGCGATGTTCC | SEQ ID 627 |
| TPS42JL | 8a | TPS42JL-8aR | TCAAATGCTTGATGTGCTCACG | SEQ ID 628 |
| TPS42JL | 8b | TPS42JL-8bF | TGGAAGGAGATGAATAATGAAAATGG | SEQ ID 629 |
| TPS42JL | 8b | TPS42JL-8bR | GATCTTTTGATAGAGTATTTTGAGAAGC | SEQ ID 630 |
| TPS43JL | 1 | TPS43JL-1F | TCACTTAGAACCACAAAAGACCC | SEQ ID 631 |
| TPS43JL | 1 | TPS43JL-1R | GCCAACAAATAAGCCATGTTGC | SEQ ID 632 |
| TPS43JL | 2a | TPS43JL-2aF | ACAGATTTAGAGGCAGAGATGGG | SEQ ID 633 |
| TPS43JL | 2a | TPS43JL-2aR | GTGGTGAAACTCTTGGCTTCC | SEQ ID 634 |
| TPS43JL | 2b | TPS43JL-2bF | AGCTTCACACCTTGGAATGG | SEQ ID 635 |
| TPS43JL | 2b | TPS43JL-2bR | ATCCAACTTAGCCAACTCAAGC | SEQ ID 636 |
| TPS43JL | 3 | TPS43JL-3F | TGCAAGAGATCGTGTGGTGG | SEQ ID 637 |
| TPS43JL | 3 | TPS43JL-3R | ACTGCATTTGTGAAAAGTTCAAGC | SEQ ID 638 |
| TPS43JL | 4 | TPS43JL-4F | TGGGACATAAGGGCAATAAGGG | SEQ ID 639 |
| TPS43JL | 4 | TPS43JL-4R | CGATCACTTCATTACCAAAATTAAGCA | SEQ ID 640 |
| TPS43JL | 5 | TPS43JL-5F | TCAGTTGGTGGTCATGCAGC | SEQ ID 641 |
| TPS43JL | 5 | TPS43JL-5R | TGAAGTTCCTAAATCATCACTAAGCC | SEQ ID 642 |
| TPS43JL | 6 | TPS43JL-6F | TCAGTGGAGTGCTACATGGC | SEQ ID 643 |
| TPS43JL | 6 | TPS43JL-6R | TCACCATTATTTTTGGCAGGC | SEQ ID 644 |
| TPS44JL | 1a | TPS44JL-1aF | ACAAAGAGAGTTATGTGAAGATTATTGAGC | SEQ ID 645 |
| TPS44JL | 1a | TPS44JL-1aR | TCAAGTGTCTCTAAAGGGTTTTCC | SEQ ID 646 |
| TPS44JL | 1b | TPS44JL-1bF | ACTTCATGGTCTTCATCCTTTGG | SEQ ID 647 |
| TPS44JL | 1b | TPS44JL-1bR | TTCCCTAAGCAACCGAAAGC | SEQ ID 648 |
| TPS44JL | 2 | TPS44JL-2F | GCCCTAATGCACCCTATTCG | SEQ ID 649 |
| TPS44JL | 2 | TPS44JL-2R | TAATTCTTTTTGATGTAGTTGTTGAAGC | SEQ ID 650 |
| TPS44JL | 3 | TPS44JL-3F | TGATGACCAAGTTGATTTCTTTGC | SEQ ID 651 |
| TPS44JL | 3 | TPS44JL-3R | TTTCTAACTGCTTCAGTAAAAGGC | SEQ ID 652 |
| TPS44JL | 4 | TPS44JL-4F | ACTAGAGTACATGAAAGTATGTTACAAGA | SEQ ID 653 |
| TPS44JL | 4 | TPS44JL-4R | ACATAGCTCGCACAGTATGGA | SEQ ID 654 |
| TPS44JL | 5 | TPS44JL-5F | AGGAAGCCCAATGGTTACACA | SEQ ID 655 |
| TPS44JL | 5 | TPS44JL-5R | AGTTCGTATAATCTTAGGTTGGGGT | SEQ ID 656 |
| TPS44JL | 6 | TPS44JL-6F | GTAGTGGCTTCCGCTGTGG | SEQ ID 657 |
| TPS44JL | 6 | TPS44JL-6R | TCGCCTTCTCTATACATCTCATGG | SEQ ID 658 |
| TPS45JL | 1 | TPS45JL-1F | TGGTCTTCATCCTTTGGAAAACCC | SEQ ID 659 |
| TPS45JL | 1 | TPS45JL-1R | TTCCCTAAGCAACCGAAAGCG | SEQ ID 660 |
| TPS45JL | 2 | TPS45JL-2F | GTGAAACATGCCCTAATGCACC | SEQ ID 661 |
| TPS45JL | 2 | TPS45JL-2R | ATCTAGTTTGGCAGTTAAAAGAAGC | SEQ ID 662 |
| TPS45JL | 3 | TPS45JL-3F | ACAGAATAGTGGAGTGTTACATTTGG | SEQ ID 663 |
| TPS45JL | 3 | TPS45JL-3R | ATAATAGTAAGCAAAGAAATCAACTTGG | SEQ ID 664 |
| TPS45JL | 5 | TPS45JL-5F | TTCAAAACTCCCAAAAAGCGAAA | SEQ ID 665 |
| TPS45JL | 5 | TPS45JL-5R | TGTCACGTCAGCATACACTCC | SEQ ID 666 |
| TPS45JL | 6a | TPS45JL-6aF | TCAAAAGATGTAGTGGCTTCTGC | SEQ ID 667 |
| TPS45JL | 6a | TPS45JL-6aR | ATTAAGAGTGGTCTAGGAATAGCG | SEQ ID 668 |
| TPS45JL | 6b | TPS45JL-6bF | CAATATGGTGTAACAGATGAAGAAGC | SEQ ID 669 |
| TPS45JL | 6b | TPS45JL-6bR | TGAGAGTATCAATCAAATTCTTGAGC | SEQ ID 670 |
| TPS46JL | 1 | TPS46JL-1F | CATCGAGACAAACTGCGAATACT | SEQ ID 671 |
| TPS46JL | 1 | TPS46JL-1R | ATATGTGATCTCCATTTTCTTCCATTG | SEQ ID 672 |
| TPS46JL | 2 | TPS46JL-2F | CATGGATGGCCCGATTGGA | SEQ ID 673 |
| TPS46JL | 2 | TPS46JL-2R | TCGAAAATGATTCTTTCCAAGCCAT | SEQ ID 674 |
| TPS46JL | 4 | TPS46JL-4F | GATTGGGGACTTAGTGAAATGGG | SEQ ID 675 |
| TPS46JL | 4 | TPS46JL-4R | GTAAAGTTTTCTAACTCGGTGATTAAGG | SEQ ID 676 |
| TPS46JL | 5 | TPS46JL-5F | GGTGGGATGGTGAAGGATTGA | SEQ ID 677 |
| TPS46JL | 5 | TPS46JL-5R | TGATGTCACTTGTTTCTTGTTGAT | SEQ ID 678 |
| TPS46JL | 6 | TPS46JL-6F | TCACACCTTGCTTCTTCCAGC | SEQ ID 679 |
| TPS46JL | 6 | TPS46JL-6R | TCATTCAACAAACGACAAATAATCATAACC | SEQ ID 680 |
| TPS46JL | 7 | TPS46JL-7F | ACTTGAAGAACAATCCCGAGG | SEQ ID 681 |
| TPS46JL | 7 | TPS46JL-7R | AACCCTAACATCATCATCGTCG | SEQ ID 682 |
| TPS47JL | 10a | TPS47JL-10aF | CAGACACTGAAATGCTTGACG | SEQ ID 683 |
| TPS47JL | 10a | TPS47JL-10aR | TAGCGGTTAGACATTTAGAGGG | SEQ ID 684 |
| TPS47JL | 10b | TPS47JL-10bF | CAACCCTCTAAATGTCTAACCGC | SEQ ID 685 |
| TPS47JL | 10b | TPS47JL-10bR | AAATTGAGTTTTGAAGGCATAGTAGG | SEQ ID 686 |
| TPS47JL | 1a | TPS47JL-1aF | ATCTTTGCCCCAAACTCAGG | SEQ ID 687 |
| TPS47JL | 1a | TPS47JL-1aR | GGTTAGGATGTGGTATCATGGC | SEQ ID 688 |
| TPS47JL | 1b | TPS47JL-1bF | TACCACATCCTAACCAACCTTCG | SEQ ID 689 |
| TPS47JL | 1b | TPS47JL-1bR | CAACAACACAAGCCAGAGTGG | SEQ ID 690 |
| TPS47JL | 2 | TPS47JL-2F | TATTCATTCATCTAATGCAAAAAGGC | SEQ ID 691 |
| TPS47JL | 2 | TPS47JL-2R | AATATGTCCGAAACGAAAACGG | SEQ ID 692 |
| TPS47JL | 3a | TPS47JL-3aF | TGTTATCATATCTTGAAGTGTTGCC | SEQ ID 693 |
| TPS47JL | 3a | TPS47JL-3aR | CTGTTGCCGATGGAGATTGG | SEQ ID 694 |
| TPS47JL | 3b | TPS47JL-3bF | CAATCTCCATCGGCAACAGC | SEQ ID 695 |
| TPS47JL | 3b | TPS47JL-3bR | TGTTATTATTGGAAAACTTGTGAACTAGG | SEQ ID 696 |
| TPS47JL | 4 | TPS47JL-4F | AGGGTTAGCTGAGCATTTCGC | SEQ ID 697 |
| TPS47JL | 4 | TPS47JL-4R | CTAGGAAAAACTTTGTAGCCATGC | SEQ ID 698 |
| TPS47JL | 5a | TPS47JL-5aF | ACTATGAATGCTTTTCGGTTACG | SEQ ID 699 |
| TPS47JL | 5a | TPS47JL-5aR | AAAATAGACTTTTGAAGTAGTTTTCTCG | SEQ ID 700 |
| TPS47JL | 5b | TPS47JL-5bF | TTGCTTTTCATGGTGAATTTGAGC | SEQ ID 701 |
| TPS47JL | 5b | TPS47JL-5bR | TTTGTTAAAAGGATTTGTATGTGGAGC | SEQ ID 702 |
| TPS47JL | 6 | TPS47JL-6F | TGGCTCGACTAGATCACTTGG | SEQ ID 703 |
| TPS47JL | 6 | TPS47JL-6R | GTGAAACCTCGACAACCTTTGG | SEQ ID 704 |
| TPS47JL | 7 | TPS47JL-7F | GGGGACTTAATGAAATGGGATTTGG | SEQ ID 705 |
| TPS47JL | 7 | TPS47JL-7R | TCATAAGGCAAAGAACAACAAGC | SEQ ID 706 |
| TPS47JL | 9 | TPS47JL-9F | CCATAGCAACTCACACCTTGC | SEQ ID 707 |
| TPS47JL | 9 | TPS47JL-9R | ACACTCTCACATTGAATTGGTCG | SEQ ID 708 |
| TPS48JL | 1 | TPS48JL-1F | CTTGCTTTTCATGGTGAATTTGAGC | SEQ ID 709 |
| TPS48JL | 1 | TPS48JL-1R | CAGTTTCTTAAAGGGATTTGTATGTTGAGC | SEQ ID 710 |
| TPS48JL | 2 | TPS48JL-2F | GATGGCTCGACTAGATCACC | SEQ ID 711 |
| TPS48JL | 2 | TPS48JL-2R | AGATGTCTTTCCCATCCATAAAGC | SEQ ID 712 |
| TPS48JL | 4 | TPS48JL-4F | AGAATGGGGACTTAGTGAAATGGG | SEQ ID 713 |
| TPS48JL | 4 | TPS48JL-4R | TGGAGAATCATAAGGCAAATAACAGC | SEQ ID 714 |
| TPS48JL | 5 | TPS48JL-5F | TGGAATAATGAAGGGTTGAGTGGT | SEQ ID 715 |
| TPS48JL | 5 | TPS48JL-5R | TCTTATGTAGCTGGTTATGTCTTCA | SEQ ID 716 |
| TPS48JL | 6a | TPS48JL-6aF | TGAATCTGAGTGGAGTAAAAGTGG | SEQ ID 717 |
| TPS48JL | 6a | TPS48JL-6aR | AGAAGAAATGAAGCTGGAAGAAGC | SEQ ID 718 |
| TPS48JL | 6b | TPS48JL-6bF | GCAACTCATACCTTGCTTCTTCC | SEQ ID 719 |
| TPS48JL | 6b | TPS48JL-6bR | GAACTTTGTAAGTCATTCAACAAACG | SEQ ID 720 |
| TPS48JL | 7a | TPS48JL-7aF | GAGGGAAAGAGAAGAAGGCAAACC | SEQ ID 721 |
| TPS48JL | 7a | TPS48JL-7aR | ACTTTTAAGCAAGATAAGTGTAGAAGCC | SEQ ID 722 |
| TPS48JL | 7b | TPS48JL-7bF | AATGACAATGGTTTTACCAATCTTCC | SEQ ID 723 |
| TPS48JL | 7b | TPS48JL-7bR | AATCGCTTTGTTAATGTCTTCAAGC | SEQ ID 724 |
| TPS49JL | 1 | TPS49JL-1F | TCGGCCAATTTTCATCCTAGT | SEQ ID 725 |
| TPS49JL | 1 | TPS49JL-1R | GGTATATTTGAGAAAGTGATCTCCCC | SEQ ID 726 |
| TPS49JL | 2 | TPS49JL-2F | GGATGCTAACTGCTGCCCC | SEQ ID 727 |
| TPS49JL | 2 | TPS49JL-2R | AAAGGGAGACCGTATGAAGGG | SEQ ID 728 |
| TPS49JL | 3a | TPS49JL-3aF | GAAATCCCAGTTGACCATGAGC | SEQ ID 729 |
| TPS49JL | 3a | TPS49JL-3aR | GATGACTGTGGTTAGGGTCG | SEQ ID 730 |
| TPS49JL | 3b | TPS49JL-3bF | CACAACTCATTTGGTGGAGGC | SEQ ID 731 |
| TPS49JL | 3b | TPS49JL-3bR | AGATGACTGTGGTTAGGGTCG | SEQ ID 732 |
| TPS49JL | 4a | TPS49JL-4aF | GGAAAGACTTGGACTTTGCATCG | SEQ ID 733 |
| TPS49JL | 4a | TPS49JL-4aR | CTAGCAGCACTGTACTTTGGC | SEQ ID 734 |
| TPS49JL | 4b | TPS49JL-4bF | GGAAAGACTTGGACTTTGCATCG | SEQ ID 735 |
| TPS49JL | 4b | TPS49JL-4bR | TTGCGTCTGTGAAGAGTTCC | SEQ ID 736 |
| TPS49JL | 5 | TPS49JL-5F | TATACGATGAAATTGAGGAGGAGTTGGC | SEQ ID 737 |
| TPS49JL | 5 | TPS49JL-5R | AGGCCATCCGATAAGTTCTGCC | SEQ ID 738 |
| TPS49JL | 6a | TPS49JL-6aF | TACTACGTGGAAGCTCAATGG | SEQ ID 739 |
| TPS49JL | 6a | TPS49JL-6aR | AAGCCAATGAAAGACCTCAGC | SEQ ID 740 |
| TPS49JL | 6b | TPS49JL-6bF | ACTACATGCTCACTGCCACG | SEQ ID 741 |
| TPS49JL | 6b | TPS49JL-6bR | TCTGCAAACTACTGCTGATGC | SEQ ID 742 |
| TPS49JL | 7a | TPS49JL-7aF | GTTTGAGCAAGATAGAGGACACG | SEQ ID 743 |
| TPS49JL | 7a | TPS49JL-7aR | GCATGAGGACAGACATGGGC | SEQ ID 744 |
| TPS49JL | 7b | TPS49JL-7bF | TGAATGAGGAGTGCATGGAGC | SEQ ID 745 |
| TPS49JL | 7b | TPS49JL-7bR | TCCGGCATGGGTGTAACCG | SEQ ID 746 |
| TPS4FN | 1 | TPS4FN-1F | AGCCTCATCACAAAATGACAAAGT | SEQ ID 747 |
| TPS4FN | 1 | TPS4FN-1R | GGTTGATAAGTTGTTGTTGGACGA | SEQ ID 748 |
| TPS4FN | 2 | TPS4FN-2F | AAGGAAGTGGTAAGGAGAGAGG | SEQ ID 749 |
| TPS4FN | 2 | TPS4FN-2R | GAAACCATAAATCCATGTTGGCG | SEQ ID 750 |
| TPS4FN | 3a | TPS4FN-3aF | AGCAAGGGAATTTTAAGGAGTGC | SEQ ID 751 |
| TPS4FN | 3a | TPS4FN-3aR | AGGTGAGTGGTGGTGAAAGC | SEQ ID 752 |
| TPS4FN | 3b | TPS4FN-3bF | TTGCTTTCACCACCACTCACC | SEQ ID 753 |
| TPS4FN | 3b | TPS4FN-3bR | GAAATGTAATGCCTGGCGTGG | SEQ ID 754 |
| TPS4FN | 4a | TPS4FN-4aF | TGCAAGAGATAGGATTGTGGAGC | SEQ ID 755 |
| TPS4FN | 4a | TPS4FN-4aR | TCTGCAACTGAGGCCAATGC | SEQ ID 756 |
| TPS4FN | 4b | TPS4FN-4bF | TGAACCTGAATTGTCACTGGC | SEQ ID 757 |
| TPS4FN | 4b | TPS4FN-4bR | GCTCAAGCTCTTCAAATGTACC | SEQ ID 758 |
| TPS4FN | 5 | TPS4FN-5F | AATTGTGCGGATCAACTTCG | SEQ ID 759 |
| TPS4FN | 5 | TPS4FN-5R | TGTAACTTTCCTCCTTTCCAAGC | SEQ ID 760 |
| TPS4FN | 6 | TPS4FN-6F | AGCGATGAAAAGATTACTTGGAGC | SEQ ID 761 |
| TPS4FN | 6 | TPS4FN-6R | CATCCATGAACCTACAAAGGATATTGC | SEQ ID 762 |
| TPS4FN | 7a | TPS4FN-7aF | AGAGATCATTCACCGTCTACCG | SEQ ID 763 |
| TPS4FN | 7a | TPS4FN-7aR | AAACTGGATAAGGCACATTAGAAGGC | SEQ ID 764 |
| TPS4FN | 7b | TPS4FN-7bF | GGCCTTCTAATGTGCCTTATCC | SEQ ID 765 |
| TPS4FN | 7b | TPS4FN-7bR | TCATGGGATTTGATCTATAAGTAACGC | SEQ ID 766 |
| TPS4JL | 1a | TPS4JL-1aF | AGTTTTAGCCTCATCACAAAATGACA | SEQ ID 767 |
| TPS4JL | 1a | TPS4JL-1aR | GTTGATAAGTTGTTGTTGGACGAA | SEQ ID 768 |
| TPS4JL | 1b | TPS4JL-lbF | TAGCCTCATCACAAAATGACAAAG | SEQ ID 769 |
| TPS4JL | 1b | TPS4JL-lbR | CCCCCAAATAGAAGGTTGATAAGT | SEQ ID 770 |
| TPS4JL | 2a | TPS4JL-2aF | TAAAAAGCAGCGAGTTGACG | SEQ ID 771 |
| TPS4JL | 2a | TPS4JL-2aR | AATGATACGACAATCCCAAACG | SEQ ID 772 |
| TPS4JL | 2b | TPS4JL-2bF | AAGGAAGTGGTAAGGAGAGAGG | SEQ ID 773 |
| TPS4JL | 2b | TPS4JL-2bR | GAAACCATAAATCCATGTTGGCG | SEQ ID 774 |
| TPS4JL | 3a | TPS4JL-3aF | AGCAAGGGAATTTTAAGGAGTGC | SEQ ID 775 |
| TPS4JL | 3a | TPS4JL-3aR | AGGTGAGTGGTGGTGAAAGC | SEQ ID 776 |
| TPS4JL | 3b | TPS4JL-3bF | CTTGCTTTCACCACCACTCACC | SEQ ID 777 |
| TPS4JL | 3b | TPS4JL-3bR | GTAATGCCTGGCGTGGAGC | SEQ ID 778 |
| TPS4JL | 4a | TPS4JL-4aF | GCAAGAGATAGGATTGTGGAGC | SEQ ID 779 |
| TPS4JL | 4a | TPS4JL-4aR | ATCTGCAACTGAGGCCAAGG | SEQ ID 780 |
| TPS4JL | 4b | TPS4JL-4bF | TGAACCTGAATTGTCACTGGC | SEQ ID 781 |
| TPS4JL | 4b | TPS4JL-4bR | GCTCAAGCTCTTCAAATGTACC | SEQ ID 782 |
| TPS4JL | 5 | TPS4JL-5F | AATTGTGCGGATCAACTTCG | SEQ ID 783 |
| TPS4JL | 5 | TPS4JL-5R | TGTAACTTTCCTCCTTTCCAAGC | SEQ ID 784 |
| TPS4JL | 6 | TPS4JL-6F | CAGTGAAGCTCGATGGTTGC | SEQ ID 785 |
| TPS4JL | 6 | TPS4JL-6R | TCCATGAACCTACAAAGGATATTGC | SEQ ID 786 |
| TPS4JL | 7a | TPS4JL-7aF | CCGTTGAGAGTTACATGAGGC | SEQ ID 787 |
| TPS4JL | 7a | TPS4JL-7aR | ACTGGATAAGGCACATTAGAAGG | SEQ ID 788 |
| TPS4JL | 7b | TPS4JL-7bF | ACAAGAGGCATGTGATGAGC | SEQ ID 789 |
| TPS4JL | 7b | TPS4JL-7bR | GGGATTTGATCTATAAGTAACGCAGC | SEQ ID 790 |
| TPS4-likeJL | 1 | TPS4-likeJL-1F | TGTCGTCTCAAATCTTAGCAACC | SEQ ID 791 |
| TPS4-likeJL | 1 | TPS4-likeJL-1R | ATGCAAAAATCGGTCTCCCC | SEQ ID 792 |
| TPS4-likeJL | 2a | TPS4-likeJL-2aF | TTCTTATGTGATGATTGGAGTAATCG | SEQ ID 793 |
| TPS4-likeJL | 2a | TPS4-likeJL-2aR | GCTTATTTTGTTGTAAATGTGTTGAAGC | SEQ ID 794 |
| TPS4-IikeJL | 2b | TPS4-IikeJL-2bF | CGATTGAAGTTAATTGATGTGGTGC | SEQ ID 795 |
| TPS4-likeJL | 2b | TPS4-likeJL-2bR | AAAGAAACCCTATATCCATGTTGTCG | SEQ ID 796 |
| TPS4-likeJL | 3a | TPS4-likeJL-3aF | GAATGTTTGGCGAGTGACACC | SEQ ID 797 |
| TPS4-likeJL | 3a | TPS4-likeJL-3aR | AAGGGCCTCTCTAGGGCTCG | SEQ ID 798 |
| TPS4-likeJL | 3b | TPS4-likeJL-3bF | AAGAACACCCCAATGATGATCC | SEQ ID 799 |
| TPS4-likeJL | 3b | TPS4-likeJL-3bR | ACTAAGCTCCTTTTTGTGCATGG | SEQ ID 800 |
| TPS4-likeJL | 4 | TPS4-likeJL-4F | GGTGGAAGGAATTAGACAGTGC | SEQ ID 801 |
| TPS4-likeJL | 4 | TPS4-likeJL-4R | TCAGCGATTGAGGAAAGTGC | SEQ ID 802 |
| TPS4-likeJL | 5 | TPS4-likeJL-5F | GGGACAAAAATTGTATGGATAAACTCC | SEQ ID 803 |
| TPS4-likeJL | 5 | TPS4-likeJL-5R | TCCTTTTCAAACTCTTGTTCAAATTCC | SEQ ID 804 |
| TPS4-likeJL | 6a | TPS4-likeJL-6aF | AGCTCGATGGTTGAATGAAGG | SEQ ID 805 |
| TPS4-likeJL | 6a | TPS4-likeJL-6aR | GGTCTTTGGAGAGCCACTCG | SEQ ID 806 |
| TPS4-likeJL | 6b | TPS4-likeJL-6bF | TGATGGCTTGCTCTTTAGTTGG | SEQ ID 807 |
| TPS4-likeJL | 6b | TPS4-likeJL-6bR | AGCCACGTCATCCATGTACC | SEQ ID 808 |
| TPS4-likeJL | 7a | TPS4-likeJL-7aF | AGAATGAGCAAGAGAGAAATCATATACC | SEQ ID 809 |
| TPS4-likeJL | 7a | TPS4-likeJL-7aR | CCATGCAATAACCACTCGCC | SEQ ID 810 |
| TPS4-likeJL | 7b | TPS4-likeJL-7bF | TCTCAAACCAACTGAAGCAGC | SEQ ID 811 |
| TPS4-likeJL | 7b | TPS4-likeJL-7bR | TTGGATCAATGAGCAAGACAGC | SEQ ID 812 |
| TPS50JL | 1 | TPS50JL-1F | GGTCTTCATCCTTTGGAAAATCC | SEQ ID 813 |
| TPS50JL | 1 | TPS50JL-1R | AAGCAACCGAAATCGAAGAGC | SEQ ID 814 |
| TPS50JL | 2 | TPS50JL-2F | AGCTTCACAAATGAGAGTTCGC | SEQ ID 815 |
| TPS50JL | 2 | TPS50JL-2R | TCGTGAGAAGGTAGTTGATGG | SEQ ID 816 |
| TPS50JL | 3 | TPS50JL-3F | ACAGAATAGTGGAGTGTTACATTTGG | SEQ ID 817 |
| TPS50JL | 3 | TPS50JL-3R | ATAATAGTAAGCAAAGAAATCAACTTGG | SEQ ID 818 |
| TPS50JL | 4 | TPS50JL-4F | ACAACTTGCCAGAGTACATGAAAG | SEQ ID 819 |
| TPS50JL | 4 | TPS50JL-4R | CGCGCAGTATGAATTTTCCTTTG | SEQ ID 820 |
| TPS50JL | 5 | TPS50JL-5F | GGATCTGAAGAGCTAATATCAATGGC | SEQ ID 821 |
| TPS50JL | 5 | TPS50JL-5R | AGTTCGTATAATCTTAGGTTGGGG | SEQ ID 822 |
| TPS50JL | 6a | TPS50JL-6aF | TCAAAAGATGTAGTGGCTTCTGC | SEQ ID 823 |
| TPS50JL | 6a | TPS50JL-6aR | ATTAAGAGTGGTCTAGGAATAGCG | SEQ ID 824 |
| TPS50JL | 6b | TPS50JL-6bF | CAATATGGTGTAACAGATGAAGAAGC | SEQ ID 825 |
| TPS50JL | 6b | TPS50JL-6bR | TGAGAGTATCAATCAAATTCTTGAGC | SEQ ID 826 |
| TPS51JL | 1 | TPS51JL-1F | AGCCAACTTTGAACCATCCA | SEQ ID 827 |
| TPS51JL | 1 | TPS51JL-1R | AAAGAGACTGAATGAAATCAAAAGACCA | SEQ ID 828 |
| TPS51JL | 2 | TPS51JL-2F | GAGGAAGATGTGAAAAGGATGC | SEQ ID 829 |
| TPS51JL | 2 | TPS51JL-2R | GCCTAAATTCAAGAGCAGTGGC | SEQ ID 830 |
| TPS51JL | 3a | TPS51JL-3aF | CAGGAAAATTCAAAACAAACATAAGTGG | SEQ ID 831 |
| TPS51JL | 3a | TPS51JL-3aR | AGCTTCCTCTAAAATGCTTTCGC | SEQ ID 832 |
| TPS51JL | 3b | TPS51JL-3bF | AGGCGAAAGCATTTTAGAGGAAGC | SEQ ID 833 |
| TPS51JL | 3b | TPS51JL-3bR | AGCTTCTATTCTTGTGGTCCTTCG | SEQ ID 834 |
| TPS51JL | 4 | TPS51JL-4F | GGTGGAGGCATACTAAACTTGG | SEQ ID 835 |
| TPS51JL | 4 | TPS51JL-4R | TGAAAAGCTCTAATTCATCTAATGTTCC | SEQ ID 836 |
| TPS51JL | 5 | TPS51JL-5F | GATGGGATGTGGAAATGATAAATGA | SEQ ID 837 |
| TPS51JL | 5 | TPS51JL-5R | ATTTTGATGGTGATGTGTTGATCT | SEQ ID 838 |
| TPS51JL | 6a | TPS51JL-6aF | CTACAAGAAGCAAAATGGTATTACAGTGG | SEQ ID 839 |
| TPS51JL | 6a | TPS51JL-6aR | GCACAATAAGAACTGGTGCTCCC | SEQ ID 840 |
| TPS51JL | 6b | TPS51JL-6bF | GGAGCACCAGTTCTTATTGTGC | SEQ ID 841 |
| TPS51JL | 6b | TPS51JL-6bR | GCACTGTGACGAATTATGGTAGG | SEQ ID 842 |
| TPS51JL | 7 | TPS51JL-7F | AAAGAGGTGATGCTCCGACG | SEQ ID 843 |
| TPS51JL | 7 | TPS51JL-7R | AGATTATCCTGAGAACTGTGACC | SEQ ID 844 |
| TPS52JL | 1 | TPS52JL-1F | TCAGAAGAGATCAGCAAACTATCAAC | SEQ ID 845 |
| TPS52JL | 1 | TPS52JL-1R | CTTGAAAGGAGTAGAAAGTGATTGA | SEQ ID 846 |
| TPS52JL | 2 | TPS52JL-2F | TGCAAAGACTTGGAATCTCTTACC | SEQ ID 847 |
| TPS52JL | 2 | TPS52JL-2R | CATACACATTTTTGTTGGTGTTGC | SEQ ID 848 |
| TPS52JL | 3 | TPS52JL-3F | GAGGCAATTTTATGGTGTCTTCC | SEQ ID 849 |
| TPS52JL | 3 | TPS52JL-3R | TTGTTTTGTGTCTTGTCTCTTCC | SEQ ID 850 |
| TPS52JL | 4 | TPS52JL-4F | GGACAATAGGAGTTTCATTTGAGCC | SEQ ID 851 |
| TPS52JL | 4 | TPS52JL-4R | TCTCAACCACATTAGTGAAGAGC | SEQ ID 852 |
| TPS52JL | 5 | TPS52JL-5F | TGGGATGTTAGTGCTATGAATGGG | SEQ ID 853 |
| TPS52JL | 5 | TPS52JL-5R | GAGGCTTTTTCCTTTTAACACATCAAATGC | SEQ ID 854 |
| TPS52JL | 6 | TPS52JL-6F | TAAGAGAAGCAAGATGGTATTATGATGG | SEQ ID 855 |
| TPS52JL | 6 | TPS52JL-6R | GTATTATGGTAGGGTATCCATTAAAGC | SEQ ID 856 |
| TPS52JL | 7 | TPS52JL-7F | CGTGTATGTGAAGAGAAAGCTCG | SEQ ID 857 |
| TPS52JL | 7 | TPS52JL-7R | AGTACATGATCTTTTGTTTGGCG | SEQ ID 858 |
| TPS53JL | 1 | TPS53JL-1F | CAGCCAACTTTGAACCATCCA | SEQ ID 859 |
| TPS53JL | 1 | TPS53JL-1R | GCTTGAAAGAGACTGAACGAAA | SEQ ID 860 |
| TPS53JL | 2 | TPS53JL-2F | CGACGAAGATGTGAAAAGGATGC | SEQ ID 861 |
| TPS53JL | 2 | TPS53JL-2R | ACCATGTTGACGTAGAAGCC | SEQ ID 862 |
| TPS53JL | 3a | TPS53JL-3aF | AGCTAGAATTTTCACAACTGAACG | SEQ ID 863 |
| TPS53JL | 3a | TPS53JL-3aR | GCTTCTATTCTTGTGGTCCTTCG | SEQ ID 864 |
| TPS53JL | 3b | TPS53JL-3bF | TACGATATTGAAGTAGTGAATCATGC | SEQ ID 865 |
| TPS53JL | 3b | TPS53JL-3bR | TTGGCAAACTCAAGCAAAATAGG | SEQ ID 866 |
| TPS53JL | 4 | TPS53JL-4F | TGGTGGAGGCATACTAAACTTGG | SEQ ID 867 |
| TPS53JL | 4 | TPS53JL-4R | GTGAAAAGCTCTAATTCATCTAATGTTCC | SEQ ID 868 |
| TPS53JL | 5 | TPS53JL-5F | GATGGGATGTGGAAATGATAAATGAA | SEQ ID 869 |
| TPS53JL | 5 | TPS53JL-5R | ATTTTGATGGTGATTTGTTGATCTCT | SEQ ID 870 |
| TPS53JL | 6a | TPS53JL-6aF | CTACAAGAAGCAAAATGGTACTACAGTGG | SEQ ID 871 |
| TPS53JL | 6a | TPS53JL-6aR | GCACAATAAGAACTGGTGCTCCC | SEQ ID 872 |
| TPS53JL | 6b | TPS53JL-6bF | GGAGCACCAGTTCTTATTGTGC | SEQ ID 873 |
| TPS53JL | 6b | TPS53JL-6bR | GCACTGTGACGAATTATGGTAGG | SEQ ID 874 |
| TPS53JL | 7 | TPS53JL-7F | AAGAGGTGATGCTCCGACG | SEQ ID 875 |
| TPS53JL | 7 | TPS53JL-7R | TAGATTATCCTGAGAACTGTGACC | SEQ ID 876 |
| TPS54JL | 1a | TPS54JL-1aF | ACAAAGAGAGTTATGTGAAGATTATTGAGC | SEQ ID 877 |
| TPS54JL | 1a | TPS54JL-1aR | CCGAAAGCGAAGAGCATCAGC | SEQ ID 878 |
| TPS54JL | 1b | TPS54JL-1bF | AATTACTTCATGGTCTTCAACCTTTGG | SEQ ID 879 |
| TPS54JL | 1b | TPS54JL-1bR | CTATAAAATAGCCTTGTTCCCTAAGC | SEQ ID 880 |
| TPS54JL | 2a | TPS54JL-2aF | AGCTTCACAAATGAGAGTTCGC | SEQ ID 881 |
| TPS54JL | 2a | TPS54JL-2aR | CGGATAGGGTGCATTAGGGC | SEQ ID 882 |
| TPS54JL | 2b | TPS54JL-2bF | ATGCACCCTATCCGAAAGAGC | SEQ ID 883 |
| TPS54JL | 2b | TPS54JL-2bR | TTCCTTTTGATGTAGTTGTTGAAGC | SEQ ID 884 |
| TPS54JL | 3 | TPS54JL-3F | ACAGAATAGTGGAGTGTTACATTTGG | SEQ ID 885 |
| TPS54JL | 3 | TPS54JL-3R | ATAATAGTAAGCAAAGAAATCAACTTGG | SEQ ID 886 |
| TPS54JL | 4 | TPS54JL-4F | TCATCAGGTGGGATATTTTTGCT | SEQ ID 887 |
| TPS54JL | 4 | TPS54JL-4R | ACATAACTCGCGCAGAATGAA | SEQ ID 888 |
| TPS54JL | 5 | TPS54JL-5F | GGATCTGAAGAGCTAATATCAATGGC | SEQ ID 889 |
| TPS54JL | 5 | TPS54JL-5R | TCGTATAATGTTAGGTTGGGGC | SEQ ID 890 |
| TPS54JL | 6 | TPS54JL-6F | TCAAAAGATGTAGTGGCTTCTGC | SEQ ID 891 |
| TPS54JL | 6 | TPS54JL-6R | ATTAAGAGTGGTCTAGGAATAGCG | SEQ ID 892 |
| TPS55JL | 1 | TPS55JL-1F | ACAAAAGGTTGAGGAATTAAAAGAGG | SEQ ID 893 |
| TPS55JL | 1 | TPS55JL-1R | CCCACAAGGAAACATCATGC | SEQ ID 894 |
| TPS55JL | 2 | TPS55JL-2F | CACACCTAAATGAGTTTTTGGCG | SEQ ID 895 |
| TPS55JL | 2 | TPS55JL-2R | CCTGCTGATTTCACTAAGCTCC | SEQ ID 896 |
| TPS55JL | 3 | TPS55JL-3F | TGTGGATGTTAGGAGTCTATTATGAACC | SEQ ID 897 |
| TPS55JL | 3 | TPS55JL-3R | ATTTCTTGCCAAAGAGTATTGGGG | SEQ ID 898 |
| TPS55JL | 4 | TPS55JL-4F | TTGTTATGAAGAGTTTGAGCAAGTG | SEQ ID 899 |
| TPS55JL | 4 | TPS55JL-4R | CTCTATAAGTTTCTTCTTTTGTAAGCAC | SEQ ID 900 |
| TPS55JL | 5 | TPS55JL-5F | GAAGCTCGATGGTTGAATAGTGG | SEQ ID 901 |
| TPS55JL | 5 | TPS55JL-5R | CATGAGCCTACAAATAATAACAGATGC | SEQ ID 902 |
| TPS55JL | 6 | TPS55JL-6F | AAATTAGCTTCACCCATATTACTTAGG | SEQ ID 903 |
| TPS55JL | 6 | TPS55JL-6R | TGGGATCAATTAGCAAAGCAGC | SEQ ID 904 |
| TPS56JL | 1 | TPS56JL-1F | TCCACTCAAATCTTAGCATCATCA | SEQ ID 905 |
| TPS56JL | 1 | TPS56JL-1R | TGGATGAAATGTTTTTGTAGGACGA | SEQ ID 906 |
| TPS56JL | 2 | TPS56JL-2F | GAAAAGGTTGAGGAATTAAAAGAAGTGG | SEQ ID 907 |
| TPS56JL | 2 | TPS56JL-2R | GTTTCAAAATGATAAGACAATGCCAAACG | SEQ ID 908 |
| TPS56JL | 3 | TPS56JL-3F | AAAATGTTTGGCAAGTGATACCC | SEQ ID 909 |
| TPS56JL | 3 | TPS56JL-3R | GGGCCTCTCTAGGGCTCG | SEQ ID 910 |
| TPS56JL | 4 | TPS56JL-4F | TAGGATTGTGGAATTGTACCTTTGG | SEQ ID 911 |
| TPS56JL | 4 | TPS56JL-4R | TGCATCATAATCAGTAATTGAGGC | SEQ ID 912 |
| TPS56JL | 5a | TPS56JL-5aF | AGGACGTTTTGAATTGTTATGAAGAGT | SEQ. ID 913 |
| TPS56JL | 5a | TPS56JL-5aR | TCTTTATGTTACTTCTTTTTCTAGCACT | SEQ. ID 914 |
| TPS56JL | 5b | TPS56JL-5bF | ACTCAATCAAGAATACATGCAAACAT | SEQ. ID 915 |
| TPS56JL | 5b | TPS56JL-5bR | GCACTTGCTCAAACTCTTCATAAC | SEQ. ID 916 |
| TPS56JL | 6a | TPS56JL-6aF | TGTTTGCATAGAGGACTCATCCC | SEQ ID 917 |
| TPS56JL | 6a | TPS56JL-6aR | TCTTTCGATCTTTGGAGAGCC | SEQ ID 918 |
| TPS56JL | 6b | TPS56JL-6bF | GTTTGCATAGAGGACTCATCCC | SEQ ID 919 |
| TPS56JL | 6b | TPS56JL-6bR | AGTTTTCATTCCAACCAAAGAGC | SEQ ID 920 |
| TPS56JL | 7a | TPS56JL-7aF | TGGTGTTTGTGAAGAAGAAGCC | SEQ ID 921 |
| TPS56JL | 7a | TPS56JL-7aR | GGTGAAGCTACTTGAGTTGGC | SEQ ID 922 |
| TPS56JL | 7b | TPS56JL-7bF | TTTGTGAAGCCAACTCAAGTAGC | SEQ ID 923 |
| TPS56JL | 7b | TPS56JL-7bR | ATTGGATGAATAAGCAAAGCAGC | SEQ ID 924 |
| TPS57JL | 1 | TPS57JL-1F | TCATCCTTTGGAAAACCCTTTGG | SEQ ID 925 |
| TPS57JL | 1 | TPS57JL-1R | AAGCAACCGAAAGCAAAGAGC | SEQ ID 926 |
| TPS57JL | 2 | TPS57JL-2F | CATATTCGACAAGTACAAGAATGAAAAAGG | SEQ ID 927 |
| TPS57JL | 2 | TPS57JL-2R | CTCCATGAACTCTCATTTGTGC | SEQ ID 928 |
| TPS57JL | 3 | TPS57JL-3F | GGAGTGCTATTTCTGGGTTTATGG | SEQ ID 929 |
| TPS57JL | 3 | TPS57JL-3R | AGGCTCTAGTTCTTCAAGTGTACC | SEQ ID 930 |
| TPS57JL | 5 | TPS57JL-5F | GTTGGGGTTGATAGTGCAGG | SEQ ID 931 |
| TPS57JL | 5 | TPS57JL-5R | TCATTCATAACTCTTCCAACTATTGCC | SEQ ID 932 |
| TPS57JL | 6 | TPS57JL-6F | GGAGCGGAAGAAATCATCAGG | SEQ ID 933 |
| TPS57JL | 6 | TPS57JL-6R | TGGGTTGTGTAAAGCCATCTCC | SEQ ID 934 |
| TPS58JL | 1 | TPS58JL-1F | ATTCAACGATTGGGGTTGTCTT | SEQ ID 935 |
| TPS58JL | 1 | TPS58JL-1R | CCGAAAGCAAAGAGCATCAGC | SEQ ID 936 |
| TPS58JL | 2 | TPS58JL-2F | CATATTCGACAAGTACAAGAATGAAAAAGG | SEQ ID 937 |
| TPS58JL | 2 | TPS58JL-2R | CTCCATGAACTCTCATTTGTGC | SEQ ID 938 |
| TPS58JL | 3a | TPS58JL-3aF | AGAATAGTGGAGTGCTATTTCTGG | SEQ ID 939 |
| TPS58JL | 3a | TPS58JL-3aR | ATTATTAGTCTGATTTGGGAAGTTTCTGC | SEQ ID 940 |
| TPS58JL | 3b | TPS58JL-3bF | TGGAGTGCTATTTCTGGGTTTATGG | SEQ ID 941 |
| TPS58JL | 3b | TPS58JL-3bR | ATTTGGTGATTATTAGTCTGATTTGGG | SEQ ID 942 |
| TPS58JL | 5 | TPS58JL-5F | GTTGGGGTTGATAGTGCAGG | SEQ ID 943 |
| TPS58JL | 5 | TPS58JL-5R | TCATTCATAACTCTTCCAACTATTGCC | SEQ ID 944 |
| TPS58JL | 6a | TPS58JL-6aF | GAAATTGTGGCTTCAACTGTGG | SEQ ID 945 |
| TPS58JL | 6a | TPS58JL-6aR | GAGCAAAGTGGGTTGTGTAAAGC | SEQ ID 946 |
| TPS58JL | 6b | TPS58JL-6bF | AGAAATCATCAGGAGAAATTGTGGC | SEQ ID 947 |
| TPS58JL | 6b | TPS58JL-6bR | TGGGTTGTGTAAAGCCATCTCC | SEQ ID 948 |
| TPS59JL | 1 | TPS59JL-1F | CACACAAATCTTAGTATCTTCAAATGACA | SEQ ID 949 |
| TPS59JL | 1 | TPS59JL-1R | CAAATCTTGTTGTGAAATGTTGTAATG | SEQ ID 950 |
| TPS59JL | 2 | TPS59JL-2F | AAAAGGTTGAGGAATTAAAAGAAGTGG | SEQ ID 951 |
| TPS59JL | 2 | TPS59JL-2R | AGTTTCAAAATGATAAGACAATCCCAAACG | SEQ ID 952 |
| TPS59JL | 3a | TPS59JL-3aF | TGAAAAATTCAAAGACGAGGATGGG | SEQ ID 953 |
| TPS59JL | 3a | TPS59JL-3aR | CATTTAGGTGTGTTGTTGTGAAAGC | SEQ ID 954 |
| TPS59JL | 3b | TPS59JL-3bF | ACTTGCTTTCACAACAACACACC | SEQ ID 955 |
| TPS59JL | 3b | TPS59JL-3bR | AAGGGCCTCTCTAGGGCTCG | SEQ ID 956 |
| TPS59JL | 3c | TPS59JL-3cF | ACACCATGAAGACGATGATCC | SEQ ID 957 |
| TPS59JL | 3c | TPS59JL-3cR | ACCTGCTGACTTCACTAAGTTCC | SEQ ID 958 |
| TPS59JL | 4 | TPS59JL-4F | AGATAGGATTGTGGAATTATACCTTTGG | SEQ ID 959 |
| TPS59JL | 4 | TPS59JL-4R | AGCTCAAGTTCTTCAAGTGTACC | SEQ ID 960 |
| TPS59JL | 5 | TPS59JL-5F | TTTGAATTGTTATGAAGAGTTTGAGC | SEQ ID 961 |
| TPS59JL | 5 | TPS59JL-5R | TGTATTGTTCTTCTTTTTCTAGCACTT | SEQ ID 962 |
| TPS59JL | 6 | TPS59JL-6F | ATTTGGATGAAGCTCGATGTTTGC | SEQ ID 963 |
| TPS59JL | 6 | TPS59JL-6R | CCATGAGCCTACAAATAGTAACAGATGC | SEQ ID 964 |
| TPS59JL | 7a | TPS59JL-7aF | TGAGGAACATTCAGCAGTGG | SEQ ID 965 |
| TPS59JL | 7a | TPS59JL-7aR | GCTTCAAAAACTCTTCATTTATTTCTTTCC | SEQ ID 966 |
| TPS59JL | 7b | TPS59JL-7bF | AAGAAATAAATGAAGAGTTTTTGAAGCC | SEQ ID 967 |
| TPS59JL | 7b | TPS59JL-7bR | CCAACGTGTGTATAACCATCTCC | SEQ ID 968 |
| TPS5FN | 1 | TPS5FN-1F | ATGTCACTATCAGGACTAATCTCC | SEQ ID 969 |
| TPS5FN | 1 | TPS5FN-1R | AAAATGAGCATCCCACAATGG | SEQ ID 970 |
| TPS5FN | 2 | TPS5FN-2F | AGCTATGGGAAAAGAATCAATGAGC | SEQ ID 971 |
| TPS5FN | 2 | TPS5FN-2R | GAGTTTGAAATGAAGAGCAGTGG | SEQ ID 972 |
| TPS5FN | 3 | TPS5FN-3F | GACGAGAAAAAGGAGTTCAAGG | SEQ ID 973 |
| TPS5FN | 3 | TPS5FN-3R | TCATCAAGTATTGTTTGAGATGTTTGG | SEQ ID 974 |
| TPS5FN | 4 | TPS5FN-4F | GCCGAAAAATGCTCACAAAGATTGG | SEQ ID 975 |
| TPS5FN | 4 | TPS5FN-4R | CTTCCCAATGCGTGTTGAAAGAGG | SEQ ID 976 |
| TPS5FN | 5 | TPS5FN-5F | ACCAACTTCCAGATTACATGAAGATA | SEQ ID 977 |
| TPS5FN | 5 | TPS5FN-5R | TAGCACGTCATACGCCATTT | SEQ ID 978 |
| TPS5FN | 6 | TPS5FN-6F | GAACCCTTAATTCTAGTCAATCTTTATTGC | SEQ ID 979 |
| TPS5FN | 6 | TPS5FN-6R | TTCCTAAATCATCAACAAGTCGAGC | SEQ ID 980 |
| TPS5FN | 7a | TPS5FN-7aF | TGAACTGAAAAGAGGAGACAATCC | SEQ ID 981 |
| TPS5FN | 7a | TPS5FN-7aR | AATGGAGACTCACCCACTCG | SEQ ID 982 |
| TPS5FN | 7b | TPS5FN-7bF | GCCATAGATTTCGTTAGGACAGC | SEQ ID 983 |
| TPS5FN | 7b | TPS5FN-7bR | GGGAATGGAAGTGAAGAACAAGG | SEQ ID 984 |
| TPS5JL | 1 | TPS5JL-1F | TCAAAGAACAACCAGCAATAGTCC | SEQ ID 985 |
| TPS5JL | 1 | TPS5JL-1R | TTGGAGTGATTGGATAAAATGAGC | SEQ ID 986 |
| TPS5JL | 2a | TPS5JL-2aF | GCTATGGGAAAAGAATCAATGAGC | SEQ ID 987 |
| TPS5JL | 2a | TPS5JL-2aR | AGTTTGAAATGAAGAGCAGTGG | SEQ ID 988 |
| TPS5JL | 2b | TPS5JL-2bF | TCTTGAGAAGGAGGCTGAAAATCC | SEQ ID 989 |
| TPS5JL | 2b | TPS5JL-2bR | GGAGTTTGAAATGAAGAGCAGTGG | SEQ ID 990 |
| TPS5JL | 3a | TPS5JL-3aF | GGAGAGTTTGAGTAAAGATGTGAAAGG | SEQ ID 991 |
| TPS5JL | 3a | TPS5JL-3aR | TCCAACCTTTTCATTCTCCAATGC | SEQ ID 992 |
| TPS5JL | 3b | TPS5JL-3bF | TTTGAGTAAAGATGTGAAAGGAATGG | SEQ ID 993 |
| TPS5JL | 3b | TPS5JL-3bR | GATGTTTGGTTGTGAAATCTCTTGC | SEQ ID 994 |
| TPS5JL | 4 | TPS5JL-4F | GAGCCACAGTTTAGATATTGCCG | SEQ ID 995 |
| TPS5JL | 4 | TPS5JL-4R | AGAGGCTTAGCTCATCAAGCG | SEQ ID 996 |
| TPS5JL | 5 | TPS5JL-5F | CGACCAACTTCCAGATTACATGAAG | SEQ ID 997 |
| TPS5JL | 5 | TPS5JL-5R | AGCACGTCATACGCCATTTCA | SEQ ID 998 |
| TPS5JL | 6a | TPS5JL-6aF | TGGAGGCAAATTGGTATCATAGTGG | SEQ ID 999 |
| TPS5JL | 6a | TPS5JL-6aR | AAAGGTGGGATATTGAAGCAAGC | SEQ ID 1000 |
| TPS5JL | 6b | TPS5JL-6bF | GAACCCTTAATTCTAGTCAATCTTTATTGC | SEQ ID 1001 |
| TPS5JL | 6b | TPS5JL-6bR | TTCCTAAATCATCAACAAGTCGAGC | SEQ ID 1002 |
| TPS5JL | 7a | TPS5JL-7aF | TGAACTGAAAAGAGGAGACAATCC | SEQ ID 1003 |
| TPS5JL | 7a | TPS5JL-7aR | AATGGAGACTCACCCACTCG | SEQ ID 1004 |
| TPS5JL | 7b | TPS5JL-7bF | TGGAAGGAAATGAATGAAGCTCG | SEQ ID 1005 |
| TPS5JL | 7b | TPS5JL-7bR | ACCCCATCTTGCTCCTTTTGG | SEQ ID 1006 |
| TPS60JL | 1 | TPS60JL-1F | GAGCTTGACTATGTTGAAAACCC | SEQ ID 1007 |
| TPS60JL | 1 | TPS60JL-1R | ATAACCTTGTTGTCTAACCAATCG | SEQ ID 1008 |
| TPS60JL | 2a | TPS60JL-2aF | GCTTCACAACTAAGAGTGCATGG | SEQ ID 1009 |
| TPS60JL | 2a | TPS60JL-2aR | TAATGTCTAGCCTGTCTCCTTTGC | SEQ ID 1010 |
| TPS60JL | 2b | TPS60JL-2bF | AACGATATTCGAGGAATGTTAAGC | SEQ ID 1011 |
| TPS60JL | 2b | TPS60JL-2bR | AGGTTTTAGCTCCAGATTCGAGG | SEQ ID 1012 |
| TPS60JL | 3 | TPS60JL-3F | TAATGGATTGTTACTTTTGGACTTTTGG | SEQ ID 1013 |
| TPS60JL | 3 | TPS60JL-3R | GTATTGCTTCAGTTAAGAGGTGTAGC | SEQ ID 1014 |
| TPS60JL | 5 | TPS60JL-5F | TCAACTACCAGAGTACATTCAACC | SEQ ID 1015 |
| TPS60JL | 5 | TPS60JL-5R | GCAATATGATTTGTCCTTAGTAAATTCTCC | SEQ ID 1016 |
| TPS60JL | 6 | TPS60JL-6F | CACTTGTTACTGCTGCTTCTCC | SEQ ID 1017 |
| TPS60JL | 6 | TPS60JL-6R | GCCAATGTCGTTAAGAACTCTACC | SEQ ID 1018 |
| TPS60JL | 7 | TPS60JL-7F | TCTGAATGAAGAGTGTCTCTATCCC | SEQ ID 1019 |
| TPS60JL | 7 | TPS60JL-7R | AGCTTCTCTTGTAAAACCATCTCC | SEQ ID 1020 |
| TPS61JL | 1a | TPS61JL-1aF | ATCATCGAAATTGAAAGACACAGG | SEQ ID 1021 |
| TPS61JL | 1a | TPS61JL-1aR | GGGCAAGATAGTTGCTCTGC | SEQ ID 1022 |
| TPS61JL | 1b | TPS61JL-1bF | GAGCAACTATCTTGCCCAACC | SEQ ID 1023 |
| TPS61JL | 1b | TPS61JL-lbR | TCATATTTGTTGTTAAGAGACTCCAGG | SEQ ID 1024 |
| TPS61JL | 2 | TPS61JL-2F | AGCTTATCGAGGATGTGAGGC | SEQ ID 1025 |
| TPS61JL | 2 | TPS61JL-2R | TCCATGAAGCCTAAGAAGCC | SEQ ID 1026 |
| TPS61JL | 3 | TPS61JL-3F | TGTTTCACAAGGCATATTTGTTGG | SEQ ID 1027 |
| TPS61JL | 3 | TPS61JL-3R | AGTTCCAAAGCATGAACCACC | SEQ ID 1028 |
| TPS61JL | 4 | TPS61JL-4F | GTTGGTGGAAGAATGTGGGC | SEQ ID 1029 |
| TPS61JL | 4 | TPS61JL-4R | GGCATTGGTGAAGTGTCTGAGC | SEQ ID 1030 |
| TPS61JL | 5 | TP561JL-5F | TGTACGGGAAACTGAAAAACTTCC | SEQ ID 1031 |
| TP561JL | 5 | TP561JL-5R | CCCTTTAGATGAGGTAAAACTAACTTGC | SEQ ID 1032 |
| TP561JL | 6 | TP561JL-6F | GCTTGGATTTCATCTTCGGGC | SEQ ID 1033 |
| TP561JL | 6 | TP561JL-6R | CGCTGAAGTTCCTAAATCGTTGC | SEQ ID 1034 |
| TP561JL | 7 | TP561JL-7F | CCTCTCATTCCCAATAAGTAAACTAGC | SEQ ID 1035 |
| TP561JL | 7 | TP561JL-7R | TCCTCAAAGTACAGGAGACATCG | SEQ ID 1036 |
| TPS62JL | 1 | TPS62JL-1F | TTGATGCTATTCAACGGCTAGG | SEQ ID 1037 |
| TPS62JL | 1 | TPS62JL-1R | CAGCAGGAACGAAGTGACCG | SEQ ID 1038 |
| TPS62JL | 2 | TPS62JL-2F | ATATGAAGCCTCCCATCTATGC | SEQ ID 1039 |
| TPS62JL | 2 | TPS62JL-2R | TGGGATAGACACCAAAAAGGTCC | SEQ ID 1040 |
| TPS62JL | 3 | TPS62JL-3F | GGTGGCGAGACATTGGTTTAGC | SEQ ID 1041 |
| TPS62JL | 3 | TPS62JL-3R | ATGGATTTTGTAAGCGCAACCC | SEQ ID 1042 |

| | | | | |
|---|---|---|---|---|
| TPS62JL | 4 | TPS62JL-4F | TATAGAAAAACTTCCAGACTCCATGA | SEQ ID 1043 |
| TPS62JL | 4 | TPS62JL-4R | TAAAGGGCTCCATCCACGC | SEQ ID 1044 |
| TPS62JL | 5 | TPS62JL-5F | GGGCAAGTTTGTGCGAAGC | SEQ ID 1045 |
| TPS62JL | 5 | TPS62JL-5R | TGGCACTACCAAAGTCATCCC | SEQ ID 1046 |
| TPS62JL | 6a | TPS62JL-6aF | AGGACATGACGGATCTTATGTGG | SEQ ID 1047 |
| TPS62JL | 6a | TPS62JL-6aR | AGGAATGGTGGTGGAAACGC | SEQ ID 1048 |
| TPS62JL | 6b | TPS62JL-6bF | TCCACCACCATTCCTCAAAGC | SEQ ID 1049 |
| TPS62JL | 6b | TPS62JL-6bR | ATGTTCTTCCAAGTGGGGTAGG | SEQ ID 1050 |
| TPS63JL | 1 | TPS63JL-1F | GAACTTGGTCAACGCTGTGC | SEQ ID 1051 |
| TPS63JL | 1 | TPS63JL-1R | ACCTCCTTGTCTCAGTAATCGG | SEQ ID 1052 |
| TPS63JL | 2a | TPS63JL-2aF | TAGTGGAAGAAGACAGAGAGGG | SEQ ID 1053 |
| TPS63JL | 2a | TPS63JL-2aR | AGTGTTGGCTGAGAAACTGTCC | SEQ ID 1054 |
| TPS63JL | 2b | TPS63JL-2bF | TCTCAGCCAACACTGCTACC | SEQ ID 1055 |
| TPS63JL | 2b | TPS63JL-2bR | GAGACTTGAACAATTTCCCTTTGG | SEQ ID 1056 |
| TPS63JL | 3 | TPS63JL-3F | GGTGGAAAGAGCTTGGTTTGG | SEQ ID 1057 |
| TPS63JL | 3 | TPS63JL-3R | GAGTGAGTTCGTCTAGTGTCC | SEQ ID 1058 |
| TPS63JL | 4 | TPS63JL-4F | GGGAAATTAAAGAGCAGTTACCCG | SEQ ID 1059 |
| TPS63JL | 4 | TPS63JL-4R | GGGTTCCATCCATGTTTTCTGT | SEQ ID 1060 |
| TPS63JL | 5a | TPS63JL-5aF | GGTTTGGTTGTGGGAAGTTGC | SEQ ID 1061 |
| TPS63JL | 5a | TPS63JL-5aR | CTGCTGTAGAAGACACAAGGC | SEQ ID 1062 |
| TPS63JL | 5b | TPS63JL-5bF | GAACGCGATTGTGAGTTCTGG | SEQ ID 1063 |
| TPS63JL | 5b | TPS63JL-5bR | GGCACTTCCTAAGTCATCCC | SEQ ID 1064 |
| TPS63JL | 6a | TPS63JL-6aF | ATGGGCATGATGGGTCTTACG | SEQ ID 1065 |
| TPS63JL | 6a | TPS63JL-6aR | CTCCTTATTGAGGCGTTCCC | SEQ ID 1066 |
| TPS63JL | 6b | TPS63JL-6bF | GCAAGGGAGCAAGTGATTCG | SEQ ID 1067 |
| TPS63JL | 6b | TPS63JL-6bR | CTGGAGGCTTGGAAGGCG | SEQ ID 1068 |
| TPS64JL | 1 | TPS64JL-1F | ACTCGGCTACTTTCTCAAAGAGG | SEQ ID 1069 |
| TPS64JL | 1 | TPS64JL-1R | ATGGATTACCAAAACGAGGAAGC | SEQ ID 1070 |
| TPS64JL | 2a | TPS64JL-2aF | AGGCTCATAGATAGCATCCAACGG | SEQ ID 1071 |
| TPS64JL | 2a | TPS64JL-2aR | GTAGCCGAAAACGAAGCCCC | SEQ ID 1072 |
| TPS64JL | 2b | TPS64JL-2bF | TCCTTCAGATGTTGTCAGATTTCAATTCC | SEQ ID 1073 |
| TPS64JL | 2b | TPS64JL-2bR | GAGGTAGTTGGAAAGCCATTATGC | SEQ ID 1074 |
| TPS64JL | 3a | TPS64JL-3aF | ATGCTGAGCTTGTATGAGGC | SEQ ID 1075 |
| TPS64JL | 3a | TPS64JL-3aR | CAAGAAGAGCAGGGCAGTGG | SEQ ID 1076 |
| TPS64JL | 3b | TPS64JL-3bF | GACACCTGAGGATGGCACC | SEQ ID 1077 |
| TPS64JL | 3b | TPS64JL-3bR | TTGTGGAGTGACTGAAGCTCG | SEQ ID 1078 |
| TPS64JL | 4 | TPS64JL-4F | GTGGAAACAGTTGGGTCTGG | SEQ ID 1079 |
| TPS64JL | 4 | TPS64JL-4R | GTGGAGTTCATCCAAAGATCCG | SEQ ID 1080 |
| TPS64JL | 5 | TPS64JL-5F | GATGGGATCTTGGTGCAATGG | SEQ ID 1081 |
| TPS64JL | 5 | TPS64JL-5R | ACATATTTTCATGTACTCAGGAAGC | SEQ ID 1082 |
| TPS64JL | 6 | TPS64JL-6F | TGAAATTGGCTACAGAGTTCTCA | SEQ ID 1083 |
| TPS64JL | 6 | TPS64JL-6R | AGTGTTGTGTAACGCATAATCCA | SEQ ID 1084 |
| TPS64JL | 7a | TPS64JL-7aF | GCATTTCTAACCGAAGCAGAATGG | SEQ ID 1085 |
| TPS64JL | 7a | TPS64JL-7aR | TGGCTGTTCCCAAATCATCCC | SEQ ID 1086 |
| TPS64JL | 7b | TPS64JL-7bF | CACTCATTTTTCCTCATAGGTCATGG | SEQ ID 1087 |
| TPS64JL | 7b | TPS64JL-7bR | TTGGCTGTTCCCAAATCATCCC | SEQ ID 1088 |
| TPS64JL | 8a | TPS64JL-8aF | AGAGAGGAGATGTTGCTTCTAGC | SEQ ID 1089 |
| TPS64JL | 8a | TPS64JL-8aR | AAGGTCAAAACAGGCCGTGG | SEQ ID 1090 |
| TPS64JL | 8b | TPS64JL-8bF | AGCTCGTGGATAGAGCTAAACG | SEQ ID 1091 |
| TPS64JL | 8b | TPS64JL-8bR | CCATGTTGATAGATGACTTGGGC | SEQ ID 1092 |
| TPS6FN | 1 | TPS6FN-1F | ATGCTACCCCATCCAATGTGC | SEQ ID 1093 |
| TPS6FN | 1 | TPS6FN-1R | AATATAATCGAAAGACCAAATGGAGGGC | SEQ ID 1094 |
| TPS6FN | 2 | TPS6FN-2F | TTAGTTGAGATGGAAAACTCTTTAGC | SEQ ID 1095 |
| TPS6FN | 2 | TPS6FN-2R | ATAGCCATGTTGACGTAGAAGC | SEQ ID 1096 |
| TPS6FN | 3 | TPS6FN-3F | TCCCACTTCATCGGAGGACC | SEQ ID 1097 |
| TPS6FN | 3 | TPS6FN-3R | TTGGCTAACTCAAGCAACATAGG | SEQ ID 1098 |
| TPS6FN | 4 | TPS6FN-4F | GGTGGAGACATACTAAACTTGGAGA | SEQ ID 1099 |
| TPS6FN | 4 | TPS6FN-4R | GCTTTGGTGAAAAGCTCTAATTCAT | SEQ ID 1100 |
| TPS6FN | 5 | TPS6FN-5F | ATGAGTTACCAGAATACATGAAGATGC | SEQ ID 1101 |
| TPS6FN | 5 | TPS6FN-5R | GGTATTGAATGTTGATGGAGATTTCTTGG | SEQ ID 1102 |
| TPS6FN | 6a | TPS6FN-6aF | GGTCGATATGTGTAAAAGTTTCTTGC | SEQ ID 1103 |
| TPS6FN | 6a | TPS6FN-6aR | ACTGGTGCTCCTACTGAAATCC | SEQ ID 1104 |
| TPS6FN | 6b | TPS6FN-6bF | AATGGTTGGATTTCAGTAGGAGC | SEQ ID 1105 |
| TPS6FN | 6b | TPS6FN-6bR | TGGCACTGTGACGAATAATGG | SEQ. ID 1106 |
| TPS6FN | 7a | TPS6FN-7aF | ATTGAAAAGAGGTGATGCTCCG | SEQ. ID 1107 |
| TPS6FN | 7a | TPS6FN-7aR | TTGGATTGATTATCTTGAGAACTATGACC | SEQ ID 1108 |
| TPS6FN | 7b | TPS6FN-7bF | ATTGTATCTGAAGAGGAAGCTCG | SEQ ID 1109 |
| TPS6FN | 7b | TPS6FN-7bR | TATAAGGGAATAGGTTCAATAATCAAGG | SEQ ID 1110 |
| TPS6JL | 1 | TPS6JL-1F | ATGTGCTGTGGTCAATAGTTCT | SEQ ID 1111 |
| TPS6JL | 1 | TPS6JL-1R | AAAGACCAAATGGAGGGCTCA | SEQ ID 1112 |
| TPS6JL | 2 | TPS6JL-2F | ACAGGTCGAGTCAAAGAATTGG | SEQ ID 1113 |
| TPS6JL | 2 | TPS6JL-2R | GCCATGTTGACGTAGAAGCC | SEQ ID 1114 |
| TPS6JL | 3a | TPS6JL-3aF | CTCCCACTTCATTGGAGGACT | SEQ ID 1115 |
| TPS6JL | 3a | TPS6JL-3aR | AGCAAACTCAAGCAAAATAGGATT | SEQ ID 1116 |
| TPS6JL | 3b | TPS6JL-3bF | GCTAAGTGGTTCATCGACGC | SEQ ID 1117 |
| TPS6JL | 3b | TPS6JL-3bR | TGATGTGTTGATTGTATCATGTTGA | SEQ ID 1118 |
| TPS6JL | 4 | TPS6JL-4F | GGTGGAGGCATACTAAACTTGG | SEQ ID 1119 |
| TPS6JL | 4 | TPS6JL-4R | GAAAAGCTCTAATTCATCCAATGTTCC | SEQ ID 1120 |
| TPS6JL | 5 | TPS6JL-5F | GATGGGATATGGAAATGATAAATGAGT | SEQ ID 1121 |
| TPS6JL | 5 | TPS6JL-5R | TGTTGATGGAGATGTGTTGGTCT | SEQ ID 1122 |
| TPS6JL | 6 | TPS6JL-6F | GATTTCAGTGGGAGCACCG | SEQ ID 1123 |
| TPS6JL | 6 | TPS6JL-6R | ACTATGACGAATTATGGCGGG | SEQ ID 1124 |
| TPS6JL | 7 | TPS6JL-7F | GAACTGAAAAGAGGTGATGCTCC | SEQ ID 1125 |
| TPS6JL | 7 | TPS6JL-7R | TTTGGATTGATTATCTTGAGAACTATGACC | SEQ ID 1126 |
| TPS6-likeJL | 1 | TPS6-likeJL-1F | ATGCTACCCCATCCAATGTGC | SEQ ID 1127 |
| TPS6-likeJL | 1 | TPS6-likeJL-1R | AATATAATCAAAAGACCAAATGGAGGGC | SEQ ID 1128 |
| TPS6-likeJL | 2 | TPS6-likeJL-2F | CAACTTGAACTCATTGATACATTGC | SEQ ID 1129 |
| TPS6-likeJL | 2 | TPS6-likeJL-2R | TAGCCATGTTGACGTAGAAGCC | SEQ ID 1130 |
| TPS6-likeJL | 3 | TPS6-likeJL-3F | AGCTCCCACTTCATCGGAGG | SEQ ID 1131 |
| TPS6-likeJL | 3 | TPS6-likeJL-3R | TTTGGCTAACTCAAGCAACATAGG | SEQ ID 1132 |
| TPS6-likeJL | 4 | TPS6-likeJL-4F | GGTGGAGACATACTAAACTTGGAGA | SEQ ID 1133 |
| TPS6-likeJL | 4 | TPS6-likeJL-4R | GCTTTGGTGAAAAGCTCTAATTCAT | SEQ ID 1134 |
| TPS6-likeJL | 5 | TPS6-likeJL-5F | AGTTACCAGAATACATGAAGATGCC | SEQ ID 1135 |
| TPS6-likeJL | 5 | TPS6-likeJL-5R | TTCTTGGTCTCTTAACACCTCAAA | SEQ ID 1136 |
| TPS6-likeJL | 6a | TPS6-likeJL-6aF | GGTCGATATGTGTAAAAGTTTCTTGC | SEQ ID 1137 |
| TPS6-likeJL | 6a | TPS6-likeJL-6aR | ACTGGTGCTCCTACTGAAATCC | SEQ ID 1138 |
| TPS6-likeJL | 6b | TPS6-likeJL-6bF | GAAAATGGTTGGATTTCAGTAGGAGC | SEQ ID 1139 |
| TPS6-likeJL | 6b | TPS6-likeJL-6bR | TGGCACTGTGACGAATAATGGC | SEQ ID 1140 |
| TPS6-likeJL | 7 | TPS6-likeJL-7F | AATTGAAAAGAGGTGATGCTCCG | SEQ ID 1141 |
| TPS6-likeJL | 7 | TPS6-likeJL-7R | TTTGGATTGATTATCTTGAGAACTATGACC | SEQ ID 1142 |
| TPS7FN | 1 | TPS7FN-1F | AGTCAAGTGTTAGCTTCATCTCA | SEQ ID 1143 |
| TPS7FN | 1 | TPS7FN-1R | CGCCCCAAATAGAAGGGTGA | SEQ ID 1144 |
| TPS7FN | 2 | TPS7FN-2F | GAGAGTGAAATTGAGAAATTGTTGG | SEQ ID 1145 |
| TPS7FN | 2 | TPS7FN-2R | TGTCTTAATAATCTAAACCAAAGAGAAGC | SEQ ID 1146 |
| TPS7FN | 3a | TPS7FN-3aF | TGATAACCGACGTTTCGGG | SEQ ID 1147 |
| TPS7FN | 3a | TPS7FN-3aR | CTAGCATGAAGCCTCTCTAAGG | SEQ ID 1148 |
| TPS7FN | 3b | TPS7FN-3bF | GGAAAGGCCACTAAGAATGACC | SEQ ID 1149 |
| TPS7FN | 3b | TPS7FN-3bR | ACCTCACAATTTCACTAAGCTCC | SEQ ID 1150 |
| TPS7FN | 4 | TPS7FN-4F | GTGGAAGGAGCATGAGTTTGC | SEQ ID 1151 |
| TPS7FN | 4 | TPS7FN-4R | TGACTTTGGTTAGAAGTTTTCTTGC | SEQ ID 1152 |
| TPS7FN | 6a | TPS7FN-6aF | GAAGAAGCTCGATGGTTAAATGAAGG | SEQ ID 1153 |
| TPS7FN | 6a | TPS7FN-6aR | AGTAGAAGCTGAAACAATCTTAGGG | SEQ ID 1154 |
| TPS7FN | 6b | TPS7FN-6bF | TCTGGTTACGTTTTGTTGATAGC | SEQ ID 1155 |
| TPS7FN | 6b | TPS7FN-6bR | TGAATCTTGAGAGGAGAGTAGAAGC | SEQ ID 1156 |
| TPS7FN | 7 | TPS7FN-7F | TGAAGCAATATGAGGTTTCAGAGG | SEQ ID 1157 |
| TPS7FN | 7 | TPS7FN-7R | ATGGGATGGGATCTATAAGTAAAGC | SEQ ID 1158 |
| TPS8FN | 1 | TPS8FN-1F | AAGTCTTAGCTTCATCTCAATTATGTGAC | SEQ ID 1159 |
| TPS8FN | 1 | TPS8FN-1R | TCGATCACCCCAAATAGAAGGG | SEQ ID 1160 |
| TPS8FN | 2 | TPS8FN-2F | CGAGAGTGAAATCGAGAAATTATTGG | SEQ ID 1161 |
| TPS8FN | 2 | TPS8FN-2R | CACTTTGTCTTAATAGTCTGAACCG | SEQ ID 1162 |
| TPS8FN | 3 | TPS8FN-3F | AGCTTGTATGAGGCTTCGC | SEQ ID 1163 |
| TPS8FN | 3 | TPS8FN-3R | TCTCTATGGTCTTTCTTAATGGCG | SEQ ID 1164 |
| TPS8FN | 4 | TPS8FN-4F | GGTGGAACTGTATTTTTGGATATTGGG | SEQ ID 1165 |
| TPS8FN | 4 | TPS8FN-4R | ACCTTTGAATTGCTTTGGTAAGAAGC | SEQ ID 1166 |
| TPS8FN | 6a | TPS8FN-6aF | GAAGCTCGATGGTTGAATGAAGG | SEQ ID 1167 |
| TPS8FN | 6a | TPS8FN-6aR | GCGAGAGCCTATGTCATCC | SEQ ID 1168 |
| TPS8FN | 6b | TPS8FN-6bF | TGTGGTTACGTTATGTTGATAGCC | SEQ ID 1169 |
| TPS8FN | 6b | TPS8FN-6bR | AATCTTGATAGGAGAGTGGAAGC | SEQ ID 1170 |
| TPS8FN | 7 | TPS8FN-7F | GTTTGAGCAAGAGAGAAATCACATACC | SEQ ID 1171 |
| TPS8FN | 7 | TPS8FN-7R | TGTAAAATTAAGAACACGAACTAAGATAGG | SEQ ID 1172 |
| TPS8JL | 1 | TPS8JL-1F | TCAAGTCTTAGCTTCATCTCAATTATGT | SEQ ID 1173 |
| TPS8JL | 1 | TPS8JL-1R | TCGATCACCCCAAATAGAAGG | SEQ ID 1174 |
| TPS8JL | 2 | TPS8JL-2F | TTTGAGAGTGAAATTGAGAAATTGTTGG | SEQ ID 1175 |
| TPS8JL | 2 | TPS8JL-2R | TAAATCCATGTTGTCTTAATAATCTAAACC | SEQ ID 1176 |
| TPS8JL | 3a | TPS8JL-3aF | GACGCTGAAGGTAATTTTAAGAAAAGC | SEQ ID 1177 |
| TPS8JL | 3a | TPS8JL-3aR | AAGGTGAGTGGTTGTGAAAGC | SEQ ID 1178 |
| TPS8JL | 3b | TPS8JL-3bF | GCTTCACACTTGAGTTATGTTGG | SEQ ID 1179 |
| TPS8JL | 3b | TPS8JL-3bR | CTCTCTATGGTCTTTCTTAGAGGC | SEQ ID 1180 |
| TPS8JL | 4 | TPS8JL-4F | AGGATGGTGGAACTGTATTTTTGG | SEQ ID 1181 |
| TPS8JL | 4 | TPS8JL-4R | CCTTTGAATTGCTTTGGTAAGAAGC | SEQ ID 1182 |
| TPS8JL | 6 | TPS8JL-6F | GAAGAAGCTCGATGGTTGAATGAAGG | SEQ ID 1183 |
| TPS8JL | 6 | TPS8JL-6R | AGAGTGGAAGCTGAAACAATCTTAGG | SEQ ID 1184 |
| TPS8JL | 7a | TPS8JL-7aF | TGAGCAACAGAGAAATCACATACC | SEQ ID 1185 |
| TPS8JL | 7a | TPS8JL-7aR | GAACACGAAGTAAGATAGGAAAAGGC | SEQ ID 1186 |
| TPS8JL | 7b | TPS8JL-7bF | GTGCCTTTTCCTATCTTACTTCG | SEQ ID 1187 |
| TPS8JL | 7b | TPS8JL-7bR | CAATGCTTTCTTTGAGCACTTTTCC | SEQ ID 1188 |
| TPS8-likeJL | 2 | TPS8-likeJL-2F | TTTGAGAGTGAAATTGAGAAATTGTTGG | SEQ ID 1189 |
| TPS8-likeJL | 2 | TPS8-likeJL-2R | TAAATCCATGTTGTCTTAATAATCTAAACC | SEQ ID 1190 |
| TPS8-likeJL | 3a | TPS8-likeJL-3aF | GCTTGATAACCGATGTTTCGGG | SEQ ID 1191 |
| TPS8-likeJL | 3a | TPS8-likeJL-3aR | GAGGTGAGTGGTTGTGAAAGC | SEQ ID 1192 |
| TPS8-likeJL | 3b | TPS8-likeJL-3bF | TCACCTCAAGGCTATTGTGGC | SEQ ID 1193 |
| TPS8-likeJL | 3b | TPS8-likeJL-3bR | AGATGTAAAACCTAGCATGAAGCC | SEQ ID 1194 |
| TPS8-likeJL | 4 | TPS8-likeJL-4F | GGTGGAAGGAGCATGAGTTTGC | SEQ ID 1195 |
| TPS8-likeJL | 4 | TPS8-likeJL-4R | TTGAGGCTAATGCAATGACTTTGG | SEQ ID 1196 |
| TPS8-likeJL | 5 | TPS8-likeJL-5F | GGGACATAAATTGTCTGGATAAACTTGA | SEQ ID 1197 |
| TPS8-likeJL | 5 | TPS8-IikeJL-5R | TTTTTAAGCTCCTTTTCAAATTCTTCATAA | SEQ ID 1198 |
| TPS8-likeJL | 6 | TPS8-likeJL-6F | AGCTCGATGGTTGAGTGAAGG | SEQ ID 1199 |
| TPS8-likeJL | 6 | TPS8-likeJL-6R | ACCTAGCAAGTAGAGTGGAAGC | SEQ ID 1200 |
| TPS8-likeJL | 7a | TPS8-likeJL-7aF | TGAGCAAAAGAGAAATCACATACC | SEQ ID 1201 |
| TPS8-likeJL | 7a | TPS8-likeJL-7aR | TTTCTTTCCAGTGGGTGTCC | SEQ ID 1202 |
| TPS8-likeJL | 7b | TPS8-likeJL-7bF | TATGGGGTATCAGAGAAAGAGGC | SEQ ID 1203 |
| TPS8-likeJL | 7b | TPS8-likeJL-7bR | GAACACGAACTAAGATAGGAAAAGGC | SEQ ID 1204 |
| TPS8-likeJL | 7c | TPS8-likeJL-7cF | GTGCCTTTTCCTATCTTAGTTCG | SEQ ID 1205 |
| TPS8-likeJL | 7c | TPS8-IikeJL-7cR | CAATGCTTTCTTTGAGCACTTTTCC | SEQ ID 1206 |
| TPS9FN | 1 | TPS9FN-1F | TCCACTCAAATCTTAGCAACCTC | SEQ ID 1207 |
| TPS9FN | 1 | TPS9FN-1R | TGCAAAAATCGGTCTCCCCA | SEQ ID 1208 |
| TPS9FN | 2a | TPS9FN-2aF | TGAAGTTAATTGATGTGGTAGAACG | SEQ ID 1209 |
| TPS9FN | 2a | TPS9FN-2aR | AGAAACCCTATATCCATGTTGTCG | SEQ ID 1210 |
| TPS9FN | 2b | TPS9FN-2bF | CAAGTTGAAGAATTGAAAGAAGTGG | SEQ ID 1211 |
| TPS9FN | 2b | TPS9FN-2bR | AAATGATAGGACAATCCCAAACG | SEQ ID 1212 |
| TPS9FN | 3a | TPS9FN-3aF | GCGAGTGACACCGTTGGTT | SEQ ID 1213 |
| TPS9FN | 3a | TPS9FN-3aR | TGGATCATCATTGGGGTGTTCTTT | SEQ ID 1214 |
| TPS9FN | 3b | TPS9FN-3bF | AAAGAACACCCCAATGATGATCC | SEQ ID 1215 |
| TPS9FN | 3b | TPS9FN-3bR | GGGTCTTTCTTAAGGGCCTC | SEQ ID 1216 |
| TPS9FN | 4 | TPS9FN-4F | TGGTGGAAGGAATTAGACAGTGC | SEQ ID 1217 |
| TPS9FN | 4 | TPS9FN-4R | ATCAGCGATTGAGGAAAGTGC | SEQ ID 1218 |
| TPS9FN | 5 | TPS9FN-5F | GATAAACTCCATCCAGAATACTTGC | SEQ ID 1219 |
| TPS9FN | 5 | TPS9FN-5R | ACTTTGTAAGTTTCCTCCTTTTCAA | SEQ ID 1220 |
| TPS9FN | 6a | TPS9FN-6aF | GAAGCTCGATGGTTGAATGAAGG | SEQ ID 1221 |
| TPS9FN | 6a | TPS9FN-6aR | CGCTTGCCCTAACAATCTTGG | SEQ ID 1222 |
| TPS9FN | 6b | TPS9FN-6bF | GTTGATGGCTTGCTCTTTAGTTGG | SEQ ID 1223 |
| TPS9FN | 6b | TPS9FN-6bR | TGTGACCAGCCACGTCATCC | SEQ ID 1224 |
| TPS9FN | 7 | TPS9FN-7F | TGTGATGAAATGAATAGGCGAGTGG | SEQ ID 1225 |
| TPS9FN | 7 | TPS9FN-7R | CCATAACCCTAGCAAGATTCAGAGC | SEQ ID 1226 |
| TPS9JL | 1 | TPS9JL-1F | TCAAGTTTTAGCCTCATCACAAAA | SEQ ID 1227 |
| TPS9JL | 1 | TPS9JL-1R | CCCAAATAGAAGGTTGATAAGTTGT | SEQ ID 1228 |
| TPS9JL | 2 | TPS9JL-2F | GCAGCGAGTTGACGAATTAAAGG | SEQ ID 1229 |
| TPS9JL | 2 | TPS9JL-2R | TGAAACCATAAATCCATGTTGGC | SEQ ID 1230 |
| TPS9JL | 3a | TPS9JL-3aF | TGCTTGATAACTGACATTCCCG | SEQ ID 1231 |
| TPS9JL | 3a | TPS9JL-3aR | AAGGTGAGTGGTGGTGAAAGC | SEQ ID 1232 |
| TPS9JL | 3b | TPS9JL-3bF | AGTGCTTGATAACTGACATTCCC | SEQ ID 1233 |
| TPS9JL | 3b | TPS9JL-3bR | ATGAAATGTAATGCCTAGCGTGG | SEQ ID 1234 |
| TPS9JL | 4 | TPS9JL-4F | TGCAAGAGATAGGATTGTGGAGC | SEQ ID 1235 |
| TPS9JL | 4 | TPS9JL-4R | TCTGCAACTGAGGCCAATGC | SEQ ID 1236 |
| TPS9JL | 5 | TPS9JL-5F | ACTTAAATTGTGCGGATCAACTACG | SEQ ID 1237 |
| TPS9JL | 5 | TPS9JL-5R | GTAAACTTTGTAACTTTCCTCCTTTCC | SEQ ID 1238 |
| TPS9JL | 6 | TPS9JL-6F | TCAGTGAAGCTCGATGGTTGC | SEQ ID 1239 |
| TPS9JL | 6 | TPS9JL-6R | TGCAATCTCTCATTATCTTGGGG | SEQ ID 1240 |
| TPS9JL | 7 | TPS9JL-7F | GAGATCATTCACCGTCTACCG | SEQ ID 1241 |
| TPS9JL | 7 | TPS9JL-7R | TTTTTGTCTCTTTTCCAACATGCG | SEQ ID 1242 |
| TPS9-like2JL | 1 | TPS9-like2JL-1F | TGTCGTCTCAAATCTTAGCAACC | SEQ ID 1243 |
| TPS9-like2JL | 1 | TPS9-like2JL-1R | ATGCAAAAATCGGTCTCCCC | SEQ ID 1244 |
| TPS9-like2JL | 2a | TPS9-like2JL-2aF | GCCAAGTTGAAGAATTGAAAGAAGTGG | SEQ ID 1245 |
| TPS9-like2JL | 2a | TPS9-like2JL-2aR | ACTCTCAAAATGATAGGACAATCCC | SEQ ID 1246 |
| TPS9-like2JL | 2b | TPS9-like2JL-2bF | AGAAGTGGTAAGAAAGGAGATATTTGG | SEQ ID 1247 |
| TPS9-like2JL | 2b | TPS9-like2JL-2bR | AAGAAACCCTATATCCATGTTGTCG | SEQ ID 1248 |
| TPS9-like2JL | 3a | TPS9-like2JL-3aF | GAATGTTTGGCGAGTGACACC | SEQ ID 1249 |
| TPS9-like2JL | 3a | TPS9-like2JL-3aR | AAGGGCCTCTCTAGGGCTCG | SEQ ID 1250 |
| TPS9-like2JL | 3b | TPS9-like2JL-3bF | AAGAACACCCCAATGATGATCC | SEQ ID 1251 |
| TPS9-like2JL | 3b | TPS9-like2JL-3bR | ACTAAGCTCCTTTTTGTGCATGG | SEQ ID 1252 |
| TPS9-like2JL | 4a | TPS9-like2JL-4aF | TGGTGGAAGGAATTAGACAGTGC | SEQ ID 1253 |
| TPS9-like2JL | 4a | TPS9-like2JL-4aR | ATCAGCGATTGAGGAAAGTGC | SEQ ID 1254 |
| TPS9-like2JL | 4b | TPS9-like2JL-4bF | TTATGAACCCCAATACTCTTTTGC | SEQ ID 1255 |
| TPS9-like2JL | 4b | TPS9-like2JL-4bR | AGGAGCTTATGTTCTTCAAATATACC | SEQ ID 1256 |
| TPS9-like2JL | 5 | TPS9-like2JL-5F | GGATAAACTCCATCCAGAATACTTGC | SEQ ID 1257 |
| TPS9-like2JL | 5 | TPS9-like2JL-5R | TCTTGTTCAAATTCCTCAAAAGATTGC | SEQ ID 1258 |
| TPS9-like2JL | 6a | TPS9-like2JL-6aF | GAAGCTCGATGGTTGAATGAAGG | SEQ ID 1259 |
| TPS9-like2JL | 6a | TPS9-like2JL-6aR | CGCTTGCCCTAACAATCTTGG | SEQ ID 1260 |
| TPS9-like2JL | 6b | TPS9-like2JL-6bF | TGATGGCTTGCTCTTTAGTTGG | SEQ ID 1261 |
| TPS9-like2JL | 6b | TPS9-like2JL-6bR | AGCCACGTCATCCATGTACC | SEQ ID 1262 |
| TPS9-like2JL | 7a | TPS9-like2JL-7aF | AGAATGAGCAAGAGAGAAATCATATACC | SEQ ID 1263 |
| TPS9-like2JL | 7a | TPS9-like2JL-7aR | CCATGCAATAACCACTCGCC | SEQ ID 1264 |
| TPS9-like2JL | 7b | TPS9-like2JL-7bF | TAGGCGAGTGGTTATTGCATGG | SEQ ID 1265 |
| TPS9-like2JL | 7b | TPS9-like2JL-7bR | CCTAGCAAGATTCAGAGCACG | SEQ ID 1266 |
| TPS9-likeJL | 1 | TPS9-likeJL-1F | AAAATGAGAAAATACATAAAATTGTTCGAC | SEQ ID 1267 |
| TPS9-likeJL | 1 | TPS9-likeJL-1R | TCGATCTCCCCAAATAGATGGA | SEQ ID 1268 |
| TPS9-likeJL | 2 | TPS9-likeJL-2F | TTGAAGAATTGAAAGAAGTAGTAAGAAAGG | SEQ ID 1269 |
| TPS9-likeJL | 2 | TPS9-likeJL-2R | TCAAAATGATAGGACAATCCCAAACG | SEQ ID 1270 |
| TPS9-likeJL | 3a | TPS9-likeJL-3aF | TGACAAGTTCAAAGATGAGAATGGC | SEQ ID 1271 |
| TPS9-likeJL | 3a | TPS9-likeJL-3aR | TAGTAAATCTTCCCCGACGC | SEQ ID 1272 |
| TPS9-likeJL | 3b | TPS9-likeJL-3bF | ACATTTGAGTTGCGTCGGGG | SEQ ID 1273 |
| TPS9-likeJL | 3b | TPS9-likeJL-3bR | TAGCTTGGAGCCTGTTTAGGG | SEQ ID 1274 |
| TPS9-likeJL | 3c | TPS9-likeJL-3cF | AAGAAAAACCCTAAACAGGCTCC | SEQ ID 1275 |
| TPS9-likeJL | 3c | TPS9-likeJL-3cR | CTAAGCTCCTTTTTGTGCATGG | SEQ ID 1276 |
| TPS9-likeJL | 4 | TPS9-likeJL-4F | AGAGACAGGAGTGTGGAACTATACC | SEQ ID 1277 |
| TPS9-likeJL | 4 | TPS9-likeJL-4R | TGTCATCAGCTATTGTGGCAAAGG | SEQ ID 1278 |
| TPS9-likeJL | 5 | TPS9-likeJL-5F | TGAAGAATTTGAGCAAGGGCTTA | SEQ ID 1279 |
| TPS9-likeJL | 5 | TPS9-likeJL-5R | GCGTAATGAACTCTGTAAGTTTCT | SEQ ID 1280 |
| TPS9-likeJL | 6 | TPS9-likeJL-6F | GTGGTTAAAGAAAGCTGAACGC | SEQ ID 1281 |
| TPS9-likeJL | 6 | TPS9-likeJL-6R | GCCGACAAATAGTAGTGGATGC | SEQ ID 1282 |
| TPS9-likeJL | 7 | TPS9-likeJL-7F | TGAATAGGCGAGTGGTTATTGC | SEQ ID 1283 |
| TPS9-likeJL | 7 | TPS9-likeJL-7R | TGCAAGATTCAGGGCACG | SEQ ID 1284 |

[0432] The hybridization/melting characteristics of the primers of Table 2 are shown in FIG. 1. The designed primers all had melting temperatures between 57° C. and 63° C., with annealing temperatures ranging from 52° C. to 58° C.

[0433] These primers can be used to amplify their target sequences in traditional PCR on total DNA or purified genomic DNA, as well as in reverse-transcriptase PCR to identify variants and presence/absence variation of expressed DNA.

[0434] Table 3 depicts an example of parameters of a traditional PCR protocol in which the primers provided herein (e.g., as described in Table 2 and FIG. 1) can be used:

TABLE 3

| Traditional Program: 30 cycles | Temperature | Time | |
|---|---|---|---|
| Initiation/Polymerase Activation: | 95-97° C. | 2 | mins |
| Start of Cycling: | | | |
| Denaturation: | 95° C. | 10 | secs |
| Step Down Annealing: | 52-58° C. ** | 10 | secs |
| Elongation: | 72° C. | 30 | secs |
| Final Elongation Step: | 72° C. | 5-15 | mins |

** Annealing temperature is specific for each primer set. For determining optimal T_{annealing}, the highest Tₘ of the two primers in a given set minus 5 degrees Celsius results in the optimal annealing temperature.

[0435] Table 4 depicts an example of parameters of a step-down PCR protocol, using standard PCR reagents, in which the primers provided herein (e.g., as described in Table 2 and FIG. 1) can be used:

TABLE 4

| Step-Down Program: 30 cycles | Temperature | Time | |
|---|---|---|---|
| Initiation/Polymerase Activation: | 95-97° C. | 2 | mins |
| Start of Cycling: | | | |
| Denaturation: | 95° C. | 10 | secs |
| Step Down Annealing: | 60° C. (sec. | 10 | secs |
| | target 50° C.) | | |
| Elongation: | 72° C. | 30 | secs |
| Final Elongation Step: | 72° C. | 5-15 | mins |

[0436] It is understood by those of skill in the art that modifications to these protocols can be made to achieve the same or similar results. For example, the temperatures for the various steps in the can be modified by between about 1-5° C., or touchdown PCR can be performed, i.e., the annealing temperature is adjusted based on the cycle number.

### Example 2: Use of Exon-Specific Primers to Obtain Terpene Synthase Fingerprints of a Plant Cultivar

### DNA Isolation

[0437] Genomic DNA is isolated from Cannabis samples using the Qiagen DNA Easy Plant genomic DNA isolation kits (Qiagen) or the Promega Wizard genomic DNA kit (Promega) using manufacturer's instructions, FTA plant saver cards (Whatman's Flinders Technology Associates, a technology developed by GE Healthcare for lysing cells and storing DNA on a piece of Whatman filter paper), or an in-house crude preparation of genomic DNA extracts. A crude DNA extract is prepared by Tris/Triton-X pre-treatment of 1 mm raw leaf or leaf imprinted FTA card sections, as modified from Klimyuk et al. (Plant J., 3(3):493-494 (1993)) in a modified 96 well format for high throughput processing. Leaf or FTA selections were placed aseptically in a 96 well microtiter plate, 100 uL 0.25M Tris-HCl with 0.25% Triton-X-100 was added to each well, and the plates were incubated at 100° C. for 5 minutes on a Veriti thermocycler (ABI). 3 uL of crude genomic DNA extract was used as input for the pre-amplification PCR reaction.

### RNA Isolation

[0438] Plant material/tissue from Cannabis is flash frozen in liquid nitrogen or placed in a RNase inhibitory solution, such as RNALater, for in-grow collection of tissue for cDNA analysis. Total RNA is then isolated from Cannabis tissues using any plant RNA extraction kit or method available and/or known to those of skill in the art. Examples of such kits include: the Qiagen RNAeasy plant extraction kit, which can be used following manufacturer's instructions or modifying the instructions by using RLC buffer to provide a higher quality extraction that yields greater concentrations of RNA, the Direct-zol RNA isolation kit and the Zymogen Quick-RNA Plant mini prep kit. An example of an RNA isolation protocol is as follows:

[0439] Total RNA is isolated from fresh Cannabis leaf tissue samples using the Direct-zol RNA isolation kit and Zymogen Quick-RNA Plant mini prep kit with DNAase digestion, using manufacturer's instructions (Zymogen). Purified RNA is prepared for quantification using the QuantiFluor HS-ssRNA System (Promega) and quantified using a Quantus Fluorometer (Promega), as per the manufacturer's instructions.

[0440] The quantified RNA is diluted to a final working concentration of 5 ng/uL and used as normalized input into either a First strand cDNA synthesis reaction or a one-step reverse transcriptase real-time qPCR reaction.

cDNA Synthesis

[0441] The single-stranded RNA is then converted to double-stranded cDNA using any available cDNA-synthesis reverse transcriptase (RT-PCR) kit or method available and/or known to those of skill in the art. Example of kits that can be used are the High Capacity RNA-to-cDNA Kit or The SuperScript IV First-Strand Synthesis System (both from Thermofisher Scientific), or Qiagen's FastLane Cell cDNA Kit. These provide double-stranded DNA that can be subjected to High Resolution Melt (HRM) analysis with or without a pre-amplification step, depending on the RNA extraction quality. Additionally, after the RNA extraction and before the cDNA synthesis, the sample can be subjected to ribo-depletion or mRNA amplification, to remove rRNA and obtain greater sensitivity for the detection of terpene synthase genes that are expressed at a low level. An example of an cDNA synthesis protocol is as follows:

[0442] Quantified RNA is used as input for cDNA synthesis using the SuperScript™ IV First-Strand Synthesis System (ThermoFisher). cDNA synthesis reactions are prepared as follows: 1 μL 50 μM Oligo d(T) 20 primer (SEQ ID NO:1400), 1 uL of 10 mM dNTP mix (10 mM each dNTP), 8 μLTemplate RNA (10 pg-5 μg total RNA or 10 pg-500 ng mRNA), up to 3 μL DEPC-treated water are mixed together for a 13 μL final volume. After mixing and briefly centrifuging, the RNA-primer mix reactions were heated at 65° C. for 5 minutes, and then incubated at 0° C. for 2 minutes on a Veriti thermocycler (ABI).

[0443] Following annealing, the plate is pierced using a plate piercer and 7 uL Reverse transcriptase (RT) reaction mix is added to each reaction for a final volume of 20 ul final volume for cDNA synthesis. The RT reaction mix is prepared by mixing together the following: 4 μL of 5× SSIV Buffer, 1 μL of 100 mM DTT, 1 μL of Ribonuclease Inhibitor, and 1 μL of SuperScript™ IV Reverse Transcriptase (200 U/μL). The plate is sealed and briefly centrifuged, then loaded onto a Veriti thermocycler for cDNA synthesis using the following protocol:
[0444] Incubate the combined reaction mixture at 50-55° C. for 10 minutes;
[0445] Inactivate the reaction mixture by incubation at 80° C. for 10 minutes, then store at 4° C.

[0446] The resulting products of cDNA synthesis are prepared for quantification using the QuantiFluor HS-dsDNA System (Promega) and quantified using a Quantus Fluorometer (Promega), as per the manufacturer's instructions. The quantitated cDNA is diluted to a 2 ng/uL final working concentration and used as normalized input into either an end-point PCR reaction or a Taqman real-time qPCR reaction.

Endpoint PCR with Gel Analysis

[0447] 2.5 uL of normalized cDNA is used as input for a PCR Master Mix (total volume: 22.5 uL), as follows: 12.5 uL 2X Promega Colorless GoTaq (Promega), 0.1 uL of 100 uM Primer

[0448] Mix (see Table 2 in Example 1 for primer sequences; 100 uM of a single primer pair to detect one exon, or multiple primer pairs that each detects an exon of unique size in the set of TPS genes of the plant cultivar of interest), and 9.5 uL Nuclease free Water (Ambion).

[0449] The reactions are subjected to the following thermocycler protocol: 1 cycle of 95° C. for 10 mins; 35 cycles of 95° C. for 40 seconds, 60° C. for 2 mins, 72° C. for 2 mins; 1 cycle of 72° C. for 5 mins; 4° C. hold. The End point PCR reactions are analyzed by diluting 1:2 in nuclease free water and 20 ul is loaded into each well of one or more E-Gel™ EX Agarose Gels, 2%, depending on the number of samples, and run for 10 minutes on 1-2% gel settings for the E-gel system. The bands are analyzed for the presence of exons, based on the expected sizes of the amplicons. In addition, if the DNA is normalized, the intensities (e.g., fluorescence intensity) of the bands can provide information regarding the numbers of copies of the TPS genes and/or the ploidy (e.g., diploid, triploid, tetraploid, etc.).

### Pre-Amplification PCR

[0450] To reduce the effect of plant materials in subsequent reactions and analyses, for example when crude DNA or RNA extracts are used, plant pigments and potentially real time qPCR-inhibiting compounds often found in such extracts can optionally be removed by performing a pre-amplification PCR for 10 cycles. 2.5 uL of crude genomic DNA extract is transferred to a second PCR plate, with each well pre-loaded with 22.5 uL of Pre-amplification PCR master mix prepared per reaction as follows: 12.5 uL 2× Promega Colorless GoTaq (Promega), 3 uL of 4 uM of the desired primers to be analyzed (see Table in Example 1 for primer sequences), and 7 uL Nuclease free Water (Ambion). The reactions are subjected to the following thermocycler protocol: 1 cycle of 95° C. for 10 mins; 10 cycles of 95° C. for 40 sec, 60° C. for 2 mins, 72° C. for 2 mins; 1 cycle of 72° C. for 5 mins; 4° C. hold.

[0451] Pre-amplification reactions are diluted 1:5 with 100 uL Nuclease free water (Ambion). The diluted pre-amplification reactions are prepared for quantification using the QuantiFluor dsDNA System (Promega) and quantified using a Quantus Fluorometer (Promega), as per manufacturer's instructions. Quantitated diluted pre-amplification reactions reveal a final working concentration of ˜1 ng/uL, which is used as unnormalized input into the real time qPCR reactions.

### High Resolution Melt (HRM) Analysis

[0452] HRM analysis was performed in 10 uL reactions on a LightCycler 480 qPCR (Roche Applied Systems) using the following protocol: 1 pre-incubation cycle (95° C. for 10 mins), 45 amplification cycles (95° C. for 10 secs, 60° C. for 15 secs, 72 C for 10 secs), 1 cycle of HRM (95° C. for 1 min, 40° C. for 1 min, 65° C. for 1 sec and heat to 95° C. with 25 continuous acquisitions per degree Celsius followed by a final cooling cycle (40° C. for 10 secs) (Vossen et al., Biochemica 4:10-11 (2007)). Each reaction contains: 5 uL of ˜1 ng/uL of the diluted pre-amplified template that is the product of pre-amplification PCR. cDNA also can be amplified in an exon-specific manner to get a fingerprint of the terpene synthase expressosome, i.e., to see which of the TPS genes are expressed (using a single pair of primers or multiple pairs of primers that each amplify an exon of a unique size), or gDNA can be amplified (with or without pre-amplification) to get a fingerprint of the entire genome.

[0453] 5 uL of HRM Master Mix (prepared per reaction as follows: 3.5 uL 2× High Resolution Melting Master Mix containing HRM dye (Roche Applied Systems), 0.6 uL of 4 uM Primer Mix (see Table 2 in Example 1 for primer sequences; 4 uM of a single primer pair to detect one exon, or multiple primer pairs that each detects an exon of unique size in the set of TPS genes of the plant cultivar of interest), 0.8 uL of 25 mM MgCl2, 1.125 uL of Nuclease free water). High Resolution Melting data was analyzed using the LightCycler 480 Melt Genotyping software. Fluorescence intensity as a function of temperature for each sample also was analyzed using R software and Matlab custom scripts to determine statistical variation of melt curves and statistical analysis. An example of a resulting fingerprint representing 24 terpene synthase paralogs (i.e., a subset of the 74 detectable genes) of a Cannabis plant cultivar is provided in FIG. 8.

[0454] As shown in the last column of the Table in FIG. 8, each of the detected 24 TPS genes is associated with/assigned a unique barcode based on the exons within which amplicons are amplified and detected for each gene. In addition, each amplicon within an exon that is targeted for amplification (each yellow square, will be changed to black/white indicator for the application) can be assigned a genotypic group number based on the HRM group assigned to that amplicon during the HRM analysis. The combination of all the barcodes that are detected provides an overall cultivar fingerprint (TPS gene profile) of the Cannabis plant cultivar; this fingerprint is unique to the cultivar and depends on the terpene synthase genes and/or paralogs that are present and any mutations they carry, which can be identified by HRM.

[0455] The fingerprint obtained using HRM can encompass all 74 terpene synthase paralogs that can be amplified using the primers listed in Table 2 provided in Example 1, e.g., for a complete understanding of these terpene synthase paralog genotypes present in a given cultivar's genome. Alternately, smaller subsets of these primers can be used, depending on the terpene synthase(s) or terpene(s) of interest.

### Example 3: Use of Terpene Synthase Fingerprints of a Plant Cultivar for Selective Breeding

[0456] The HRM analysis described in Example 2 above can be used to obtain terpene synthase paralog fingerprints of plant cultivars and use that information for selective breeding of offspring cultivars having desired characteristics. For example, provided in FIG. 7 are two “parent” plant cultivars, Strain A and Strain B, having fingerprints for 21 terpene synthase paralogs as shown in FIG. 7.

[0457] The fingerprints (barcodes) for Strain A (chemovar) and Strain B (chemovar) show that they are homozygous for terpene synthase paralogs 1 and 11-21. Terpene synthase paralogs 2-10 are present in Strain A and absent in Strain B. Therefore, by breeding Strain A with Strain B, one would knowingly be in-breeding for homozygosity of paralogs 1 and 11-21, which are seen in both strains (chemovars) as demonstrated by the identical enzymatic bar codes. The offspring should be homozygous for these paralogs and one would expect that if both parents expressed a given gene, then the offspring also will express that gene.

[0458] With respect to the paralogs that are absent in Strain B but present in Strain A, one can expect that some of the offspring might inherit the paralogs that are present in Strain A. With this knowledge, one can screen the offspring with only the primers for the paralogs that one wants to ensure are either inherited or not inherited in the offspring, thereby breeding for and selecting offspring with desired characteristics.

### Example 4: Analysis of the Variation in TPS Gene Content Among Cannabis Cultivars

[0459] To assess the extent of variation in TPS gene content among Cannabis varieties, six genome assemblies were used as shown in Table 6 below.

TABLE 6

| | | Assembly | | | |
|---|---|---|---|---|---|
| Name | Accession No. | Length (bp) | # Contigs | Contig N50 | |
| Jamaican Lion | GCA_003660325.2 | 1,073,903,735 | 556 | 3.8 | Mbp |
| Tibet(JL) | GCA_013030365.1 | 812,525,420 | 483 | 83 | Mbp |
| cs10 | GCF_900626175.1 | 876,147,649 | 221 | 92 | Mbp |
| Purple Kush | GCA_000230575.5 | 891,964,663 | 12,836 | 133 | Kbp |
| USO31 | PGA_Assembly_uso31.fasta | 982,000,000 | 761 | 103 | Mbp |
| cannbio2 | GCA_900626175.2 | 914,397,426 | 147 | 91 | Mbp |

[0460] A reference set of all currently known TPS gene sequences was assembled, and this set was used as a query set for GenomeThreader, a gene structure prediction tool (version 1.7.3, Gremme et al., Inf. And Sotware Technol., 47(15):965-978 (2005)). GenomeThreader output for the six genomes was parsed to give a set of genomic segments, each paired with the most similar sequence from the reference set, along with a count of frameshifts. To further refine the gene structure and use additional data provided in the output files, each of these pairs was then searched with Exonerate (version 2.2, Slater et al., BMC Bioinformatics, 6(1):1-11 (2005)) run in exhaustive mode to get the optimal output for each alignment. Exonerate also was used to generate the cDNA sequence for each gene. The predicted cDNAs were compared to the reference data set using BLASTX (version 2.6.0, Altschul et al., Nucl. Acids Res., 25(17):3389-3402 (1997)). The BLAST output was evaluated for completeness and presence of in frame stop codons. Genes were assessed as complete if they had at least 7 exons (which is a well conserved standard for class a and b TPS genes), covered at least 95% of the query sequence length, and had no in frame stop codons. Statistics for the six genomes are shown in Table 6, and results of the gene discovery analysis are shown in the heat map (FIG. 2). For simplicity of analysis, genes were grouped into bins of 95% identity at the protein level. The heatmap shows the number of TPS genes (within 95% sequence identity) across six Cannabis genome assemblies. For each genome, white bands indicate no were genes found, light grey denotes 1 gene, medium grey denotes 2 genes, and black denotes 3 genes. To the left side of FIG. 2 is a phylogenetic tree of these genes, divided into 3 clades. The “TPS-b” clade, typically associated with monoterpene biosynthesis, is at the top, “TPS-a,” associated with sesquiterpene biosynthesis, is in the middle, and the small “TPS-g” clade, also associated with monoterpene biosynthesis, is at the bottom. Predicted plastid import signals (predicted using LOCALIZER, Sperschneider et al., Sci. Reports, 7(1): 1-14 (2017)), are shown as black dots. Light grey dots indicate no import signal was found.

[0461] The results show a remarkable amount of variation for TPS gene content across Cannabis varieties. A “core set” of genes (most of them sesquiterpene synthases) were found in every genome, although there may be multiple copies in any given genome. One of these is TPS9, the caryophyllene/humulene synthase, which can be expected given that beta-caryophyllene is the second most abundant terpene in Cannabis and is present at some level in the majority of strains. At the other end of the spectrum are what seem to be relatively rare genes that are only found in a single genome. One of these is a TPS that catalyzes the production of terpinolene, designated in some aspects as TPS37 (an example of which is the enzyme that catalyzes the production of terpinolene of Cannabis Sativa, csTPS37FN), the terpinolene synthase with expression in flower tissues. In previous work (Allen et al, PLOS ONE, 14(9): e0222363 (2019)), it was shown that terpinolene is an uncommon monoterpene present in just trace levels or below the detection limit in most strains of recreational Cannabis; in those strains where it is present, however, it typically is one of the dominant terpenes. This is consistent with presence/absence variation of the gene, and it is shown here.

[0462] Taken together, these results show that TPS gene content is a key differentiator between Cannabis strains. This means that the strains can be bred for specific terpene content, given a system for tracking the gene set in each parent, or in the offspring of a cross.

### Example 5: Design of Primers for Amplifying and Cloning Full-Length TPS Genes

[0463] Cloning primers were designed to amplify the following TPS genes 1) TPS9L4, 2) TPS9L21, 3) csTPS37FN cDNA (cleaved, no signal peptide sequence encoding the chloroplast import signal), 4) csTPS16CC, and 5) csTPS20CT. The primers were designed using full-length RNA sequence data. To create these targets, the primers were designed using a combination of by hand, primer3 analysis under standard/default conditions, and a Tm calculator for a specific range of 60° C. The primers (SEQ ID NOS:1330-1338) were screened by BLAST on the NCBI database and identified to be specific for amplifying full-length 1) TPS9L4 (LPA4 type), 2) TPS9L21 (LPA21.3 type), 3) csTPS37FN cDNA (cleaved, no signal peptide sequence encoding the chloroplast import signal), 4) csTPS16CC, and 5) csTPS20CT from the forward 5′ ATG start position bp position 1 and reverse 3′ TAA end minus 3 bp position. For csTPS37FN cDNA, a unique forward primer was designed starting at bp position post chloroplast import signal sequence and an ATG was added to the 5′ end for reverse 3′ TAA minus 3 bp position. To provide a bacterial vector insertion site in the target amplicon for molecular cloning, a 5′-end tag (5′-CACC-3′) was manually added to each forward primer after the primers were designed and checked computationally for specificity.

[0464] Mid-flower RNA (RNA from plant samples at 4-5 weeks post flower initiation) was extracted from Cannabis sativa samples (LPA 004, LPA 021.3 and LPA 005). The cDNA was synthesized and then subjected to a standard GoTaq PCR reaction (Promega, Madison, WI) using 5 primer pairs: SEQ ID NOS: 1330 and 1331; SEQ ID NOS: 1330 and 1332; SEQ ID NOS: 1333 and 1334; SEQ ID NOS: 1335 and 1336; and SEQ ID NOS: 1337 and 1338. Each of the primer sets were found to detect the presence or absence of specific Terpene synthases in Cannabis sativa, as seen by gel electrophoresis; Stringtie was used to identify the sequences corresponding to each of the terpene synthase genes. TPS9L21 (TPS9 LPA21.3 type) was detected in cDNA mid flower libraries of LPA4, LPA5, and LPA21.3. TPS9L4 (TPS9 LPA4) type, however, was detected only in LPA4 and LPA5 mid flower cDNA libraries and not in LPA21.3. csTPS16CC was detected in cDNA mid flower libraries of LPA5 and LPA21.3. csTPS20CT was detected in LPA4, LPA5, and LPA21.3 mid flower cDNA libraries. csTPS37FN was detected in cDNA mid flower libraries of LPA5 and not in LPA4 or LPA21.3. To confirm their identity, all amplicons were excised from the gels and carried into downstream analysis of targeted sequencing via Oxford nanopore and molecular cloning and were followed up with functional characterization.

### Example 6: Analysis of gDNA and cDNA from Cannabis Plants by LAMP Assay

[0465] Total RNA, total gDNA, crude FTA extract (nucleic acid from extract from filter paper, such as Whatman, and synthesized cDNA templates were prepared from three distinct genotype/chemotypes of Type I Cannabis plants (de Meijer et al., Genetics, 163(1):335-346 (2003)). The samples were isolated from mid-flower tissue of the plants, and the samples for each of the distinct genotypes/chemotypes are named LPA4, LPA5, and LPA21.3.

[0466] For each of the samples, gDNA, cDNA and FTA crude extracts were subjected to GoTaq PCR reaction (Promega, Madison, WI) using primers B3 and F3 from csTPS37FN LAMP Primer Sets 1, 2 and 3 for the detection of csTPS37FN. Using the B3 and F3 primers from LAMP Primer Set 1 in a GoTaq PCR reaction using LPA005 gDNA, LPA005 cDNA, LPA004 gDNA, LPA004 cDNA, LPA021.3 gDNA, LPA021.3 gDNA, gel electrophoresis analysis showed that the target amplicons of interest are present after PCR as a non-specific uniform sized ˜200 bp amplicon product whether amplified from gDNA, cDNA, or FTA extract input in the LPA005 sample. The amplicon product was absent in LPA004 and LPA021.3 samples from either cDNA or gDNA.

[0467] The csTPS37FN B3/F3 Primer Set 1 target amplicons of interest were each excised from the gel, and the amplicons purified and sequenced by Sanger sequencing; 133 bp of DNA sequence was recovered with a 99.2% consensus agreement (132 bp out of 133 bp) between bands labeled TPS37-1 gDNA (LPA005 gDNA), TPS37-1 cDNA (LPA005 cDNA), and TPS37-1 FTA (LPA005 FTA Extract) samples and the csTPS37FN published reference sequences MK614216.1 and Finola (GCA_003417725.2). A single SNP (C to A) in the alignment was observed in the labeled TPS37-1 gDNA (LPA005 gDNA), TPS37-1 cDNA (LPA005 cDNA), and TPS37-1 FTA (LPA005 FTA Extract) samples relative to the csTPS37FN published reference sequences MK614216.1 and Finola (GCA_003417725.2).

[0468] Using the B3 and F3 primers from LAMP Primer Set 2 in a GoTaq PCR reaction on LPA005 gDNA, LPA005 cDNA, LPA004 gDNA, LPA004 cDNA, LPA021.3 gDNA, LPA021.3 gDNA LPA005 FTA Extract and NTC, as revealed by gel electrophoresis analysis, showed specific detection of distinct sized amplicons at ˜480 bp for LPA005 gDNA, at ˜200 bp for LPA005cDNA, and at ˜480 bp for LPA005 FTA extract. Amplicons were absent in LPA004 and LPA021.3 samples from either cDNA or gDNA input. The csTPS37FN B3/F3 Set 2 target amplicons of interest were each excised from the gel, the amplicons purified and sequenced by Sanger sequencing; 415 bp and 414 bp of DNA sequence was recovered from the LPA005 gDNA and LPA005 FTA extract with a 98.5% and 98.3% nucleotide consensus agreement (409 bp and 408 bp out of 415 bp) between the LPA005 gDNA and LPA005 FTA extract bands labeled TPS37-2 gDNA (LPA005 gDNA), TPS37-2 FTA extract (LPA005 FTA extract) and the csTPS37FN published reference sequence from Finola (GCA_003417725.2), while 141 bp of DNA sequence was recovered from the LPA005 cDNA with a 100% nucleotide similarity consensus agreement (141 bp out of 141 bp) between the LPA005 cDNA bands labeled TPS37-2 cDNA (LPA005 cDNA) and the published reference sequence from Finola (GCA_003417725.2).

[0469] Using the B3 and F3 primers from LAMP Primer Set 3, in a GoTaq PCR reaction on LPA005 gDNA, LPA005 cDNA, LPA004 gDNA, LPA004 cDNA, LPA021.3 gDNA, LPA021.3 gDNA LPA005 FTA Extract, and NTC, gel electrophoresis analysis showed specific detection of distinct sized amplicons at ˜500 bp for LPA005 gDNA, at ˜250 for LPA005cDNA, and at ˜500 bp for the LPA005 FTA extract. The target amplicons of interest are present after PCR whether amplified from gDNA, cDNA, or FTA extract from in the LPA005 sample. Amplicons were absent in LPA004 and LPA021.3 samples from either cDNA or gDNA input. The csTPS37FN B3/F3 Set 3 target amplicons of interest were each excised from the gel, the amplicons purified and sequenced by Sanger sequencing; 437 bp and 427 bp of DNA sequence was recovered from the LPA005 gDNA and LPA005 FTA extract with a 98.8% and 96.5% nucleotide similarity consensus agreement (432 bp and 422 bp out of 437 bp) between the LPA005 gDNA and LPA005 FTA extract bands labeled TPS37-3 gDNA (LPA005 gDNA), TPS37-3 FTA extract (LPA005 FTA extract) and the csTPS37FN published reference sequence from Finola (GCA_003417725.2), while 180 bp of DNA sequence was recovered from the LPA005 cDNA with a 100% nucleotide similarity consensus agreement (180 bp out of 180 bp) between the LPA005 cDNA bands labeled TPS37-2 cDNA (LPA005 cDNA) and the published reference sequence from Finola (GCA_003417725.2).

[0470] Using csTPS37FN LAMP Primer Sets 1, 2, and 3, 1 uL of the following input from sample numbers 1) LPA005 gDNA, 2) LPA005, 3) LPA004 gDNA, 4) LPA004 cDNA, 5) LPA021.3 gDNA, 6) LPA021.3 cDNA, 7) LPA005 FTA extract, and 8) NTC were analyzed. The sample set was loaded into a csTPS37FN LAMP based assay detection reaction prepared with NEB WarmStart Colorimetric LAMP Mastermix Mix (New England Biolabs, Ipswich, MA), csTPS37 LAMP Primer sets 1, 2, or 3, and nuclease free water. At time 0, all LAMP reactions are seen as dark grey. After a 45 minute reaction at 65° C., positive LAMP reactions are seen as a pale liquid and negative LAMP reactions are seen as dark grey (FIG. 3). LPA005 gDNA, LPA005 cDNA, LPA004 gDNA, LPA021.3 gDNA, and LPA005 FTA extract are seen as a pale liquid in the LAMP Primer Set 1 reactions and recorded positive; LPA004 cDNA, LPA021.3 cDNA and the negative control are seen as dark grey in the LAMP Primer Set 1 reactions and recorded negative. LPA005 cDNA are seen as pale grey in LAMP Primer Sets 2 and 3 reactions and are recorded positive; LPA005 gDNA, LPA004 gDNA, LPA004 cDNA, LPA021.3 gDNA, LPA004 cDNA, and FTA extract are seen as dark grey in LAMP Primer Sets 2 and 3 reactions and recorded negative. The results demonstrate specific detection of expressed csTPS37FN in LPA5 cDNA using csTPS37FN LAMP Primer Sets 2 and 3. Non-specific detection using csTPS37FN LAMP Primer set 1 was observed in cDNA and FTA extract for LPA005 and gDNA for LPA004, LPA005, and LPA021.3. Positive detection of accumulated amplicon is seen as pale samples rather than dark grey samples.

### Example 7: Functional Characterization of Bacterially Expressed TPS37

[0471] An in-vitro functional characterization assay of bacterially expressed csTPS37FN cloned from LPA005 was performed. A TPS Assay Buffer was prepared fresh with a final formulation of 25 mM HEPES, 100 mM KCl, 10 mM MgCl₂, 5% Glycerol, and 5 mM DTT (Booth 2017, see reference as described for FIG. 4). Geranyl Pyrophosphate (GPP) and Farnesyl pyrophosphate (FPP) (Isoprenoids.com, Tampa FL) were used as substrates for the in vitro assay. The test samples included TPS assay buffer only, TPS assay buffer+16 uM GPP, TPS assay buffer+13 uM FPP, TPS assay buffer+csTPS37FN (5 μg)+16 uM GPP, and TPS assay buffer+csTPS37FN+16 uM FPP, and 1 ppm terpinolene standard diluted in pentane (Sigma-aldrich, St. Louis, MO). The in-vitro assay tested purified protein that was prepared for functional activity studies, as demonstrated by GC-MS detection of product terpenes. The test samples included buffer only, buffer+GPP, buffer+FPP, buffer+csTPS37FN+GPP, and buffer+csTPS37FN+FPP, and a terpinolene standard. The test samples were prepared in a 500 uL reaction volume with buffer and substrate, overlaid with pentane, incubated at 35° C. for 4 hours and then assayed by a full evaporation headspace method and GC-MS. The presence or absence of 44 terpene compounds were measured. The results showed that in the buffer+csTPS37FN+GPP reaction, functional activity is observed in the form of production of terpinolene; the data demonstrated a signal to noise (S/N) of 73.63 to 1 and area of 1307 for terpinolene production and lesser amounts of 3-carene, alpha- and beta-pinene. All measurements of detected compounds in the buffer+csTPS37FN+GPP reaction were below limits of quantitation for this instrument; however, positive detection is confirmed by the presence of a quantitation ion m/z and reference ions m/z for terpinolene and quantitation ion m/z for 3-carene and alpha and beta pinenes, respectively. Observation of presence of a quantitation ion m/z and reference ions m/z for terpinolene in the terpinolene standard was also confirmed. No terpenes were observed in the test buffer only, buffer+GPP, buffer+FPP, and buffer+csTPS37FN+FPP reactions (csTPS37FN only accepts GPP and not FPP as a precursor for terpene synthesis).

### Example 8: Examples of Embodiments

[0472] A1. A method of analyzing a plant cultivar comprising at least one terpene synthase gene or a 20paralog thereof, the method comprising:
[0473] (a) obtaining a nucleic acid sample from the plant cultivar;
[0474] (b) contacting the nucleic acid sample with at least one polynucleotide primer pair under amplification conditions, thereby preparing a mixture, wherein the polynucleotide primer pair hybridizes to a unique subsequence of the terpene synthase gene or a paralog thereof, wherein the unique subsequence of the terpene synthase gene or a paralog thereof is different than the other subsequences of the terpene synthase gene or a paralog thereof and the unique subsequence of the terpene synthase gene or a paralog thereof is different than the subsequences of other terpene synthase genes and/or paralogs thereof;
[0475] (c) amplifying the mixture, thereby obtaining an amplified mixture; and
[0476] (d) analyzing the amplified mixture of (c), whereby at least one terpene synthase gene or a paralog thereof is identified and/or quantified in the amplified mixture.

[0477] A1.1. A method of preparing nucleic acid comprising at least one terpene synthase gene or a paralog thereof from a plant cultivar comprising the at least one terpene synthase gene or a paralog thereof, the method comprising:
[0478] (a) obtaining a nucleic acid sample from the plant cultivar;
[0479] (b) contacting the nucleic acid sample with at least one polynucleotide primer pair under amplification conditions, thereby preparing a mixture, wherein the polynucleotide primer pair hybridizes to a unique subsequence of the terpene synthase gene or a paralog thereof, wherein the unique subsequence of the terpene synthase gene or a paralog thereof is different than the other subsequences of the terpene synthase gene or a paralog thereof and the unique subsequence of the terpene synthase gene is different than the subsequences of the other terpene synthase genes and/or paralogs thereof;
[0480] (c) amplifying the mixture, thereby obtaining an amplified mixture; and
[0481] (d) analyzing the amplified mixture of (c), whereby at least one terpene synthase gene or a paralog thereof is identified and/or quantified in the amplified mixture and the amplified mixture is identified as comprising prepared nucleic acid comprising at least one terpene synthase gene or a paralog thereof from the plant cultivar.

[0482] A2. The method of embodiment A1 or A1.1, wherein the plant cultivar comprises a plurality of terpene synthase genes and/or paralogs thereof and the method comprises:
[0483] in (b), contacting the nucleic acid sample with a plurality of polynucleotide primer pairs under amplification conditions, thereby preparing a mixture, wherein each of the plurality of polynucleotide primer pairs hybridizes to a unique subsequence of a terpene synthase gene or a paralog thereof, wherein the unique subsequence of the terpene synthase gene or a paralog thereof is different than the other subsequences of the terpene synthase gene or a paralog thereof and the unique subsequence of the terpene synthase gene or a paralog thereof is different than the subsequences of the other terpene synthase genes and/or paralogs thereof; and
[0484] in (d), a plurality of terpene synthase genes and/or paralogs thereof are identified and/or quantified.

[0485] A3. The method of any one of embodiments A1, A1.1 or A2, wherein each of the primers of a polynucleotide primer pair hybridizes to a conserved region of the subsequence and the hybridized polynucleotide primer pair flanks a variable region of the subsequence.

[0486] A4. The method of any one of embodiments A1 to A3, wherein the subsequence is an exon, an intron, a portion within an exon or a portion within an intron.

[0487] A5. The method of any one of embodiments A1 to A4, wherein the subsequence is an exon or a portion within an exon.

[0488] A6. The method of any one of embodiments A1 to A5, wherein the identification in (d) is by one or more of high-resolution melting (HRM), quantitative PCR (qPCR), loop-mediated isothermal amplification (LAMP), restriction endonuclease digestion, gel electrophoresis and sequencing.

[0489] A7. The method of any one of embodiments A1 to A6, wherein one or more of the polynucleotide primer pairs are selected from among those set forth in SEQ ID NOS: 1-1284.

[0490] A7.1. The method of any one of embodiments A1 to A7, wherein one or more of the polynucleotide primer pairs are selected from among those set forth in SEQ ID NOS: 1-1284, or from among sequences that share 90%, 91%, 92%, 93%, 94%, 95%, 96%, 97%, 98%, 99% or more identity with any of the sequences set forth in SEQ ID NOS: 1-1284.

[0491] A7.2. The method of any one of embodiments A1 to A7.1, wherein at least one terpene synthase is a paralog of a terpene synthase gene.

[0492] A7.3. The method of any one of embodiments A1 to A5 and A7.2, wherein the identification and/or quantification in (d) is by loop-mediated isothermal amplification (LAMP).

[0493] A7.4. The method of embodiment A7.3, wherein a TPS37 gene is identified and/or quantified in (d).

[0494] A7.5. The method of embodiment A7.4, wherein the polynucleotide primer pairs are present in a set of primers selected from among SEQ ID NOS:1285-1293, SEQ ID NOS:1294-1302, SEQ ID NOS:1303-1311, SEQ ID NOS:1312-1319 and SEQ ID NOS:1320-1327.

[0495] A8. The method of any one of embodiments A1 to A7.5, wherein the terpene synthase genes and/or paralogs thereof that are identified and/or quantified are monoterpene synthase genes and/or paralogs thereof, diterpene synthase genes and/or paralogs thereof, sesquiterpene synthase genes and/or paralogs thereof or any combination thereof.

[0496] A9. The method of any one of embodiments A1 to A8, wherein, based on the terpene synthase genes and/or paralogs thereof that are identified and/or quantified, the terpene synthase gene and/or paralog expression profile and/or the terpene production profile of the plant cultivar is determined.

[0497] A10. The method of embodiment A9, wherein the terpene synthase gene and/or paralog expression profile and/or the terpene production profile is of the root, flower, stem, leaf or any combination thereof.

[0498] A11. The method of any one of embodiments A1 to A10, wherein, based on the terpene synthase genes and/or paralogs thereof that are identified and/or quantified and/or based on the terpene synthase gene expression profile that is determined and/or based on the terpene production profile that is determined, a lineage of the plant cultivar is assigned.

[0499] A11.1. The method of any one of embodiments A1 to A11, wherein, based on identifying and/or quantifying at least one terpene synthase gene or a paralog thereof in (d), determining the terpene synthase gene profile, the terpene synthase expression profile, the terpene production profile, the cannabinoid production profile, the flavonoid production profile, or any combination thereof in the plant cultivar.

[0500] A12. The method of any one of embodiments A1 to A11.1, wherein, based on the terpene synthase genes and/or paralogs thereof that are identified and/or quantified and/or based on the terpene synthase gene and/or paralog thereof expression profile that is determined and/or based on the terpene production profile that is determined, a medicinal use of the plant cultivar is assigned.

[0501] A13. The method of any one of embodiments A1 to A12, wherein, based on the terpene synthase genes and/or paralogs thereof that are identified and/or quantified and/or based on the terpene synthase gene and/or paralog thereof expression profile that is determined and/or based on the terpene production profile that is determined, that is determined, the plant cultivar is identified as resistant to an organism or situation.

[0502] A14. The method of embodiment A13, wherein the organism or situation is selected from among insects, pests, mold, chemicals, mildew, fungi, bacteria, an environmental condition or a geographic location.

[0503] A15. The method of any one of embodiments A1 to A12, wherein, based on the terpene synthase genes and/or paralogs thereof that are identified and/or quantified and/or based on the terpene synthase gene and/or paralog thereof expression profile that is determined and/or based on the terpene production profile that is determined, the plant cultivar is identified as having affinity towards an organism or situation.

[0504] A16. The method of embodiment A15, wherein the organism or situation is selected from among insects, pests, mold, mildew, fungi, bacteria, an environmental condition or a geographic location.

[0505] A17. The method of any one of embodiments A1 to A16, wherein a plurality of plant cultivars are analyzed.

[0506] A18. The method of embodiment A17, wherein the plant cultivars are of the same species.

[0507] A19. The method of embodiment A17 or A18, comprising classifying the plurality of plant cultivars based on lineage.

[0508] A20. The method of any one of embodiments A17 to A19, comprising classifying the plurality of plant cultivars based on medicinal use.

[0509] A20.1. The method of any one of embodiments A1 to A20, wherein one or more plant cultivars is/are of the family Rosidae.

[0510] A21. The method of any one of embodiments A1 to A20, wherein one or more plant cultivars is/are a Cannabis cultivar.

[0511] A21.1. The method of embodiment A21, wherein the Cannabis cultivar is selected from among one or more of Type 1, Type 2, Type 3, Type 4 and Type 5 cultivars

[0512] A22. The method of embodiment A21, wherein the monoterpene synthase genes and/or paralogs thereof of the Cannabis plant cultivar are identified and/or quantified and, based on the identified and/or quantified monoterpene synthase genes and/or the expression profile of the identified and/or quantified monoterpene synthase genes and/or paralogs thereof, the terpene production profile, the cannabinoid production profile, the flavonoid production profile, or any combination of two or more of the terpene production profile, the cannabinoid production profile and the flavonoid production profile of the Cannabis plant cultivar is determined.

[0513] A23. The method of embodiment A22, wherein, based on the cannabinoid production profile, the flavonoid production profile, or the cannabinoid production profile and the flavonoid production profile that is determined, a lineage of the Cannabis plant cultivar is assigned.

[0514] A24. The method of embodiment A22 or A23, wherein, based on the cannabinoid production profile, the flavonoid production profile, or the cannabinoid production profile and the flavonoid production profile that is determined, a medicinal use of the Cannabis plant cultivar is assigned.

[0515] A25. The method of any one of embodiments A21 to A24, wherein a plurality of Cannabis plant cultivars are analyzed.

[0516] A26. The method of embodiment A25, comprising classifying the plurality of Cannabis plant cultivars based on lineage.

[0517] A27. The method of embodiment A25, comprising classifying the plurality of plant cultivars based on medicinal use.

[0518] A28. The method of any one of embodiments A1 to A27, wherein at least one plant cultivar that is analyzed produces one or more terpenes selected from among α-Bisabolol, endo-Borneol, Camphene, Camphor, 3-Carene, Caryophyllene, Caryophyllene Oxide, α-Cedrene, Cedrol, Citronellol, Eucalyptol (1,8 Cineole), α-Farnesene, β-Farnesene, Fenchol, Fenchone, Geraniol, Geranyl Acetate, Guaiol, Humulene, Isoborneol, Isopulegol, D-Limonene, Linalool, Menthol, β-Myrcene, Nerol, trans-Nerolidol, cis-Nerolidol, trans-Ocimene, cis-Ocimene, α-Phellandrene, Phytol 1, Phytol 2, α-Pinene, β-Pinene, Pulegone, Sabinene, Sabinene Hydrate, α-Terpinene, γ-Terpinene, α-Terpineol, Terpinolene, Valencene, γ-Elemene, Z-Ocimene, E-Ocimene, α-Thujone, Thujene, γ-Muurolene, 2-Norpinene, α-Santalene, α-Selinene, Germacrene D, Eudesma-3,7(11)-diene, δ-Cadinol, trans-α-Beramotene, trans-2-pinanol, p-cymen-8-ol, Sativene, Cyclosativene, α-guaiene, γ-gurjunene, α-bulnesene, Bulnesol, α-eudesmol, β-eudesmol, Hedycaryol, γ-eudesmol, Alloaromadendrene, p-cymene, α-Copaene, β-Elemene, α-Cubebene, Linalyl acetate, Bornyl acetate, Heptacosane, Tricosane, S-Limonene, (−)-Thujopsene, Hashenene 5,5-dimethyl-1-vinylbicyclo[2.1.1]hexane, (−)-englerin A and Artemisinin.

[0519] A29. The method of any one of embodiments A9 to A27, wherein a terpene production profile is determined for one or more terpenes selected from among α-Bisabolol, endo-Borneol, Camphene, Camphor, 3-Carene, Caryophyllene, Caryophyllene Oxide, α-Cedrene, Cedrol, Citronellol, Eucalyptol (1,8 Cineole), α-Farnesene, β-Farnesene, Fenchol, Fenchone, Geraniol, Geranyl Acetate, Guaiol, Humulene, Isoborneol, Isopulegol, D-Limonene, Linalool, Menthol, β-Myrcene, Nerol, trans-Nerolidol, cis-Nerolidol, trans-Ocimene, cis-Ocimene, α-Phellandrene, Phytol 1, Phytol 2, α-Pinene, β-Pinene, Pulegone, Sabinene, Sabinene Hydrate, α-Terpinene, γ-Terpinene, α-Terpineol, Terpinolene, Valencene, γ-Elemene, Z-Ocimene, E-Ocimene, α-Thujone, Thujene, γ-Muurolene, 2-Norpinene, α-Santalene, α-Selinene, Germacrene D, Eudesma-3,7(11)-diene, δ-Cadinol, trans-α-Beramotene, trans-2-pinanol, p-cymen-8-ol, Sativene, Cyclosativene, α-guaiene, γ-gurjunene, α-bulnesene, Bulnesol, α-eudesmol, β-eudesmol, Hedycaryol, γ-eudesmol, Alloaromadendrene, p-cymene, α-Copaene, β-Elemene, α-Cubebene, Linalyl acetate, Bornyl acetate, Heptacosane, Tricosane, S-Limonene, (−)-Thujopsene, Hashenene 5,5-dimethyl-1-vinylbicyclo[2.1.1]hexane, (−)-englerin A and Artemisinin.

[0520] A30. The method of any one of embodiments A1 to A29, wherein at least one plant cultivar that is analyzed expresses one or more terpene synthases selected from among TPS11, TPS11-like, TPS12, TPS12-like, TPS13, TPS13-like, TPS13-like2, TPS14, TPS15, TPS16, TPS17, TPS18, TPS19, TPS1, TPS20, TPS23, TPS24, TPS2, TPS30, TPS30-like, TPS32, TPS33, TPS36, TPS37, TPS38, TPS39, TPS3, TPS40, TPS41, TPS42, TPS43, TPS44, TPS45, TPS46, TPS47, TPS48, TPS49, TPS4, TPS4-like, TPS50, TPS51, TPS52, TPS53, TPS54, TPS55, TPS56, TPS57, TPS58, TPS59, TPS5, TPS5, TPS60, TPS61, TPS62, TPS63, TPS64, TPS6, TPS6-like, TPS7, TPS8, TPS8, TPS8-like, TPS9, TPS9, TPS9-like and TPS9-like2.

[0521] A30.1 The method of any one of embodiments A1 to A30, wherein at least one plant cultivar that is analyzed expresses one or more terpene synthases selected from among TPS11JL, TPS11-likeJL, TPS12JL, TPS12-likeJL, TPS13JL, TPS13-likeJL, TPS13-like2JL, TPS14JL, TPS15JL, TPS16JL, TPS17JL, TPS18JL, TPS19JL, TPS1JL, TPS20JL, TPS23JL, TPS24JL, TPS2JL, TPS30JL, TPS30-likeJL, TPS32JL, TPS33JL, TPS36JL, TPS37JL, TPS38JL, TPS39JL, TPS3JL, TPS40JL, TPS41JL, TPS42JL, TPS43JL, TPS44JL, TPS45JL, TPS46JL, TPS47JL, TPS48JL, TPS49JL, TPS4JL, TPS4-likeJL, TPS50JL, TPS51JL, TPS52JL, TPS53JL, TPS54JL, TPS55JL, TPS56JL, TPS57JL, TPS58JL, TPS59JL, TPS5JL, TPS5JL, TPS60JL, TPS61JL, TPS62JL, TPS63JL, TPS64JL, TPS6JL, TPS6-likeJL, TPS7JL, TPS8JL, TPS8JL, TPS8-likeJL, TPS9JL, TPS9JL, TPS9-likeJL and TPS9-like2JL.

[0522] A31. The method of any one of embodiments A9 to A29, wherein a terpene synthase expression profile is determined for one or more terpene synthases selected from among TPS11, TPS11-like, TPS12, TPS12-like, TPS13, TPS13-like, TPS13-like2, TPS14, TPS15, TPS16, TPS17, TPS18, TPS19, TPS1, TPS20, TPS23, TPS24, TPS2, TPS30, TPS30-like, TPS32, TPS33, TPS36, TPS37, TPS38, TPS39, TPS3, TPS40, TPS41, TPS42, TPS43, TPS44, TPS45, TPS46, TPS47, TPS48, TPS49, TPS4, TPS4-like, TPS50, TPS51, TPS52, TPS53, TPS54, TPS55, TPS56, TPS57, TPS58, TPS59, TPS5, TPS5, TPS60, TPS61, TPS62, TPS63, TPS64, TPS6, TPS6-like, TPS7, TPS8, TPS8, TPS8-like, TPS9, TPS9, TPS9-like and TPS9-like2.

[0523] A31.0. The method of any one of embodiments A9 to A31, wherein at least one plant cultivar that is analyzed expresses one or more terpene synthases selected from among TPS11JL, TPS11-likeJL, TPS12JL, TPS12-likeJL, TPS13JL, TPS13-likeJL, TPS13-like2JL, TPS14JL, TPS15JL, TPS16JL, TPS17JL, TPS18JL, TPS19JL, TPS1JL, TPS20JL, TPS23JL, TPS24JL, TPS2JL, TPS30JL, TPS30-likeJL, TPS32JL, TPS33JL, TPS36JL, TPS37JL, TPS38JL, TPS39JL, TPS3JL, TPS40JL, TPS41JL, TPS42JL, TPS43JL, TPS44JL, TPS45JL, TPS46JL, TPS47JL, TPS48JL, TPS49JL, TPS4JL, TPS4-likeJL, TPS50JL, TPS51JL, TPS52JL, TPS53JL, TPS54JL, TPS55JL, TPS56JL, TPS57JL, TPS58JL, TPS59JL, TPS5JL, TPS5JL, TPS60JL, TPS61JL, TPS62JL, TPS63JL, TPS64JL, TPS6JL, TPS6-likeJL, TPS7JL, TPS8JL, TPS8JL, TPS8-likeJL, TPS9JL, TPS9JL, TPS9-likeJL and TPS9-like2JL.

[0524] A31.1. The method of any one of embodiments A28 to A31.0, wherein one or more plant cultivars is/are of the family Rosidae.

[0525] A31.2. The method of any one of embodiments A1 to A31.1, wherein one or more plant cultivars is/are a Cannabis cultivar.

[0526] A31.3. The method of embodiment A31.2, wherein the Cannabis cultivar is selected from among one or more of Type 1, Type 2, Type 3, Type 4, and Type 5 cultivars

[0527] A31.4. The method of any one of embodiments A28 to A31.3, wherein the plant cultivar is a Cannabis cultivar selected from among Jamaican Lion, Purple Kush, CannaTsu, Finola, Valley Fire and Cherry Chem.

[0528] A32. The method of any one of embodiments A1 to A31.4, further comprising, based on identifying one or more terpene synthase genes and/or paralogs thereof, determining the expression profile of one or more terpene synthase genes and/or paralogs thereof, determining the production profile of one or more terpenes, determining the production profile of one or more cannabinoids, determining the production profile of one or more flavonoids or a combination thereof, selecting a plant cultivar for in-breeding or out-crossing.

[0529] A33. The method of embodiment A32, wherein the plant cultivar is selected for its lineage that is assigned based on identifying one or more terpene synthase genes and/or paralogs thereof, determining the expression profile of one or more terpene synthase genes and/or paralogs thereof, determining the production profile of one or more terpenes, determining the production profile of one or more cannabinoids, determining the production profile of one or more flavonoids or a combination thereof.

[0530] A34. The method of embodiment A32 or A33, wherein the plant cultivar is selected for a medicinal use that is assigned based on identifying one or more terpene synthase genes and/or paralogs thereof, determining the expression profile of one or more terpene synthase genes and/or paralogs thereof, determining the production profile of one or more terpenes, determining the production profile of one or more cannabinoids, determining the production profile of one or more flavonoids or a combination thereof.

[0531] A34.1. The method of embodiment A34, wherein the plant cultivar is selected for a medicinal use that is assigned based on identifying one or more terpene synthase genes, determining the expression profile of one or more terpene synthase genes, and/or determining the production profile of one or more terpenes.

[0532] A34.2. The method of embodiment A34 or A34.1, wherein the medicinal use is selected from among one or more of antioxidant, anti-inflammatory, antibacterial, antiviral, anti-anxiety, antinociceptive, analgesic, antihypertensive, sedative, antidepressant, acetylcholine esterase inhibition (AChEI), neuro-protective and gastro-protective effects.

[0533] A34.3. The method of embodiment A34 or A34.1, wherein the medicinal use is to impart energy, mental clarity, appetite stimulation or appetite suppression.

[0534] A34.4. The method of any one of embodiments A34 to A34.3, wherein sets of between 1-50, 1-45, 1-40, 1-35, 1-30, 1-25, 1-20, 1-15, 1-10, 1-5, 1-4, 1-3, 2 or 1 TPS genes, or 1, 2, 3, 4, 5, 6, 7, 8, 9, 10, 11, 12, 13, 14, 15, 16, 17, 18, 19, 20, 21, 22, 23, 24, 25, 26, 27, 28, 29, 30, 31, 32, 33, 34, 35, 36, 37, 38, 39, 40, 41, 42, 43, 44, 45, 46, 47, 48, 49, 50, 51, 52, 53, 54, 55, 56, 57, 58, 59, 60 or more, up to 100 or more TPS genes are assigned as imparting one or more medicinal uses to a plant cultivar.

[0535] A34.5. The method of any one of embodiments A34 to A34.4, wherein the one or more TPS genes, or sets thereof, produce one or more of the terpenes selected from among α-Bisabolol, endo-Borneol, Camphene, Camphor, 3-Carene, Caryophyllene, Caryophyllene Oxide, α-Cedrene, Cedrol, Citronellol, Eucalyptol (1,8 Cineole), α-Farnesene, β-Farnesene, Fenchol, Fenchone, Geraniol, Geranyl Acetate, Guaiol, Humulene, Isoborneol, Isopulegol, D-Limonene, Linalool, Menthol, β-Myrcene, Nerol, trans-Nerolidol, cis-Nerolidol, trans-Ocimene, cis-Ocimene, α-Phellandrene, Phytol 1, Phytol 2, α-Pinene, β-Pinene, Pulegone, Sabinene, Sabinene Hydrate, α-Terpinene, γ-Terpinene, α-Terpineol, Terpinolene, Valencene, γ-Elemene, Z-Ocimene, E-Ocimene, α-Thujone, Thujene, γ-Muurolene, 2-Norpinene, α-Santalene, α-Selinene, Germacrene D, Eudesma-3,7(11)-diene, δ-Cadinol, trans-α-Beramotene, trans-2-pinanol, p-cymen-8-ol, Sativene, Cyclosativene, α-guaiene, γ-gurjunene, α-bulnesene, Bulnesol, α-eudesmol, β-eudesmol, Hedycaryol, γ-eudesmol, Alloaromadendrene, p-cymene, α-Copaene, β-Elemene, α-Cubebene, Linalyl acetate, Bornyl acetate, Heptacosane, Tricosane, S-Limonene, (−)-Thujopsene, Hashenene 5,5-dimethyl-1-vinylbicyclo[2.1.1]hexane, (−)-englerin A and Artemisinin.

[0536] A34.6. The method of any one of embodiments A34 to A34.5 that is a method of breeding for one or more offspring cultivars that show increased cannabinoid production compared to at least one of the parent cultivars.

[0537] A34.7. The method of embodiment A34.6, wherein the one or more offspring cultivars show reduced expression, or lack of expression, of one or more terpene synthases selected from among TPS13-like2JL, TPS13JL, TPS17JL, TPS30JL, TPS64JL, TPS6-likeJL, TPS6JL, TPS11-likeJL, TPS51JL, TPS30-likeJL, TPS3JL, TPS52JL, TPS5JL, TPS13-like1JL, TPS42JL, TPS1JL, TPS53JL, TPS12JL, TPS40JL, TPS63JL, TPS33JL, TPS61JL, TPS12-likeJL, TPS62JL, TPS2JL, TPS43JL, TPS11JL, TPS38JL, TPS36JL and TPS37JL compared to at least one of the parent cultivars.

[0538] A34.8. The method of any one of embodiments A34 to A34.7 that is a method of breeding for one or more offspring cultivars that produces an increased energetic effect compared to at least one of the parent cultivars.

[0539] A34.9. The method of embodiment A34.8, wherein the one or more offspring cultivars comprises a terpene profile comprising one or more of increased S-linalool production, increased terpinolene production, increased β-ocimene production, α-pinene production greater than β-pinene production, reduced or lack of R-linalool production, reduced or lack of α-terpineol production and reduced or lack of fenchol production compared to at least one of the parent cultivars.

[0540] A34.10. The method of any one of embodiments A34 to A34.9 that is a method of breeding for one or more offspring cultivars that produces an increased sedative effect compared to at least one of the parent cultivars.

[0541] A34.11. The method of embodiment A34.10, wherein the one or more offspring cultivars comprises a terpene profile comprising one or more of: about equal or equal amounts of β-pinene and α-pinene production, increased R-linalool production, increased limonene production, increased trans-nerolidol production, increased terpineol production, increased camphene production, reduced or lack of β-ocimene production, reduced or lack of S-linalool production and reduced or lack of terpinolene production compared to at least one of the parent cultivars.

[0542] A34.12. The method of any one of embodiments A34 to A34.11 that is a method of breeding for one or more offspring cultivars that produces an increased cognitive-enhancing effect compared to at least one of the parent cultivars.

[0543] A34.13. The method of embodiment A34.12, wherein the one or more offspring cultivars comprises a terpene profile comprising one or more of: greater amounts of β-pinene production relative to α-pinene production, increased β-ocimene production and increased eucalyptol production compared to at least one of the parent cultivars.

[0544] A34.14. The method of any one of embodiments A34 to A34.13 that is a method of breeding for one or more offspring cultivars that produces an increased appetite-suppressing effect compared to at least one of the parent cultivars.

[0545] A34.15. The method of embodiment A34.14, wherein the one or more offspring cultivars comprises a terpene profile comprising increased amounts of humulene production compared to at least one of the parent cultivars.

[0546] A34.16. The method of any one of embodiments A34 to A34.15 that is a method of breeding for one or more offspring cultivars that produces an increased anti-inflammatory effect compared to at least one of the parent cultivars.

[0547] A34.17. The method of embodiment A34.16, wherein the one or more offspring cultivars comprises a terpene profile comprising one or more of: increased α-pinene production, increased humulene production and increased β-caryophyllene production compared to at least one of the parent cultivars.

[0548] A34.18. The method of any one of embodiments A34 to A34.17 that is a method of breeding for one or more offspring cultivars that produces an increased anti-anxiety effect compared to at least one of the parent cultivars.

[0549] A34.19. The method of embodiment A34.18, wherein the one or more offspring cultivars comprises a terpene profile comprising one or more of: increased β-pinene production, increased humulene production, increased β-caryophyllene production, increased linalool production, increased nerolidol production and increased limonene production compared to at least one of the parent cultivars.

[0550] A34.20. The method of any one of embodiments A34 to A34.19 that is a method of breeding for one or more offspring cultivars that produces an increased antinociceptive effect compared to at least one of the parent cultivars.

[0551] A34.21. The method of embodiment A34.20, wherein the one or more offspring cultivars comprises a terpene profile comprising one or more of: increased α-bisabolol production, increased α-terpineol production, increased trans nerolidol production, increased α-phellandrene production, and increased eucalyptol production compared to at least one of the parent cultivars.

[0552] A34.22. The method of any one of embodiments A34 to A34.21 that is a method of breeding for one or more offspring cultivars that produces an increased body relaxing effect compared to at least one of the parent cultivars.

[0553] A34.23. The method of embodiment A34.22, wherein the one or more offspring cultivars comprises a terpene profile comprising one or more of: increased α-bisabolol production, increased α-terpineol production, increased trans nerolidol production and increased α-phellandrene production, compared to at least one of the parent cultivars.

[0554] A34.24. The method of any one of embodiments A34 to A34.23 that is a method of breeding for one or more offspring cultivars that produces an increased anti-depressant effect compared to at least one of the parent cultivars.

[0555] A34.25. The method of embodiment A34.24, wherein the one or more offspring cultivars comprises a terpene profile comprising one or more of: equal or about equal amounts of α-pinene and β-pinene production, increased limonene production, increased nerolidol production and increased linalool production, compared to at least one of the parent cultivars.

[0556] A34.26. The method of any one of embodiments A34 to A34.25 that is a method of breeding for one or more offspring cultivars that produces an increased amount of one or more acetyl cholinesterase-inhibitor (AChEI) terpenes compared to at least one of the parent cultivars.

[0557] A34.27. The method of embodiment A34.26, wherein the one or more offspring cultivars comprises a terpene profile comprising one or more of: increased amounts of α-pinene production, increased terpinolene production, increased β-ocimene production, increased 3-carene production, increased α and/or γ-terpinene production and increased sabinene production compared to at least one of the parent cultivars.

[0558] A34.28. The method of any one of embodiments A34 to A34.27 that is a method of breeding for one or more offspring cultivars that produces an increased anti-bacterial effect compared to at least one of the parent cultivars.

[0559] A34.29. The method of embodiment A34.28, wherein the one or more offspring cultivars comprises a terpene profile comprising one or more of: increased amounts of aromadendrene production, increased carvacrol production, increased β-caryophyllene production, increased eucalyptol production, increased fenchol production, increased germacrene D production, increased nerol production, increased pulegone production, increased sabinene production and increased geraniol production compared to at least one of the parent cultivars.

[0560] A34.30. The method of any one of embodiments A34 to A34.29 that is a method of breeding for one or more offspring cultivars that produces an increased anti-microbial effect compared to at least one of the parent cultivars.

[0561] A34.31. The method of embodiment A34.30, wherein the one or more offspring cultivars comprises a terpene profile comprising one or more of: increased amounts of camphor production, increased sabinene hydrate production and increased thymol production compared to at least one of the parent cultivars.

[0562] A34.32. The method of any one of embodiments A34 to A34.31 that is a method of breeding for one or more offspring cultivars that produces an increased fungicidal effect compared to at least one of the parent cultivars.

[0563] A34.33. The method of embodiment A34.32, wherein the one or more offspring cultivars comprises a terpene profile comprising one or more of: increased amounts of citronellol production, increased para-cymene production, increased pulegone production and increased geraniol production compared to at least one of the parent cultivars.

[0564] A34.34. The method of any one of embodiments A34 to A34.33 that is a method of breeding for one or more offspring cultivars that produces an increased expectorant effect compared to at least one of the parent cultivars.

[0565] A34.35. The method of embodiment A34.34, wherein the one or more offspring cultivars comprises a terpene profile comprising one or more of: increased amounts of camphene production, increased sabinene hydrate production and increased geraniol production compared to at least one of the parent cultivars.

[0566] A34.36. The method of any one of embodiments A34 to A34.35 that is a method of breeding for one or more offspring cultivars that produces an increased expectorant effect compared to at least one of the parent cultivars.

[0567] A34.37. The method of embodiment A34.36, wherein the one or more offspring cultivars comprises a terpene profile comprising one or more of: increased amounts of camphene production, increased sabinene hydrate production and increased geraniol production compared to at least one of the parent cultivars.

[0568] A34.38. The method of any one of embodiments A34 to A34.37 that is a method of breeding for one or more offspring cultivars that produces increased non-irritant properties compared to at least one of the parent cultivars.

[0569] A34.39. The method of embodiment A34.38, wherein the one or more offspring cultivars comprises a terpene profile comprising one or more of reduced or absent: borneol, α-cedrene, citronellol or para-cymene, or increased amounts of the counter-irritant fenchone.

[0570] A35. The method of any one of embodiments A32 to A34, wherein the plant cultivar is selected for resistance to an organism or situation that is identified based on identifying and/or quantifying one or more terpene synthase genes and/or paralogs thereof, determining the expression profile of one or more terpene synthase genes and/or paralogs thereof, determining the production profile of one or more terpenes, determining the production profile of one or more cannabinoids, determining the production profile of one or more flavonoids or a combination thereof.

[0571] A35.1. The method of embodiment A35, wherein the plant cultivar is selected for resistance to an organism or situation that is identified based on identifying one or more terpene synthase genes, determining the expression profile of one or more terpene synthase genes, and/or determining the production profile of one or more terpenes.

[0572] A35.2. The method of any one of embodiments A35 or A35.1, wherein sets of between 1-50, 1-45, 1-40, 1-35, 1-30, 1-25, 1-20, 1-15, 1-10, 1-5, 1-4, 1-3, 2 or 1 TPS genes, or 1, 2, 3, 4, 5, 6, 7, 8, 9, 10, 11, 12, 13, 14, 15, 16, 17, 18, 19, 20, 21, 22, 23, 24, 25, 26, 27, 28, 29, 30, 31, 32, 33, 34, 35, 36, 37, 38, 39, 40, 41, 42, 43, 44, 45, 46, 47, 48, 49, 50, 51, 52, 53, 54, 55, 56, 57, 58, 59, 60 or more, up to 100 or more TPS genes are assigned as imparting resistance to an organism or situation to a plant cultivar.

[0573] A35.3. The method of any one of embodiments A35 to A35.2, wherein the one or more TPS genes, or sets thereof, produce one or more of the terpenes selected from among α-Bisabolol, endo-Borneol, Camphene, Camphor, 3-Carene, Caryophyllene, Caryophyllene Oxide, α-Cedrene, Cedrol, Citronellol, Eucalyptol (1,8 Cineole), α-Farnesene, β-Farnesene, Fenchol, Fenchone, Geraniol, Geranyl Acetate, Guaiol, Humulene, Isoborneol, Isopulegol, D-Limonene, Linalool, Menthol, β-Myrcene, Nerol, trans-Nerolidol, cis-Nerolidol, trans-Ocimene, cis-Ocimene, α-Phellandrene, Phytol 1, Phytol 2, α-Pinene, β-Pinene, Pulegone, Sabinene, Sabinene Hydrate, α-Terpinene, γ-Terpinene, α-Terpineol, Terpinolene, Valencene, γ-Elemene, Z-Ocimene, E-Ocimene, α-Thujone, Thujene, γ-Muurolene, 2-Norpinene, α-Santalene, α-Selinene, Germacrene D, Eudesma-3,7(11)-diene, δ-Cadinol, trans-α-Beramotene, trans-2-pinanol, p-cymen-8-ol, Sativene, Cyclosativene, α-guaiene, γ-gurjunene, α-bulnesene, Bulnesol, α-eudesmol, β-eudesmol, Hedycaryol, γ-eudesmol, Alloaromadendrene, p-cymene, α-Copaene, β-Elemene, α-Cubebene, Linalyl acetate, Bornyl acetate, Heptacosane, Tricosane, S-Limonene, (−)-Thujopsene, Hashenene 5,5-dimethyl-1-vinylbicyclo[2.1.1]hexane, (−)-englerin A and Artemisinin.

[0574] A35.4. The method of any one of embodiments A35 to A35.3 that is a method of breeding for one or more offspring cultivars that show increased anti-pathogenic properties compared to at least one of the parent cultivars.

[0575] A35.5. The method of embodiment A35.4, wherein the one or more offspring cultivars comprises a terpene synthase profile comprising one or more of increased amounts/expression of TPS13-like2JL, TPS13JL, TPS17JL, TPS30JL, TPS64JL, TPS6-likeJL, TPS6JL, TPS11-likeJL, TPS51JL, TPS30-likeJL, TPS3JL, TPS52JL, TPS5JL, TPS13-like1JL, TPS42JL, TPS1JL, TPS53JL, TPS12JL, TPS40JL, TPS63JL, TPS33JL, TPS61JL, TPS12-likeJL, TPS62JL, TPS2JL, TPS43JL, TPS11JL, TPS38JL, TPS36JL, TPS37JL.

[0576] A35.6. The method of any one of embodiments A35 to A35.5 that is a method of breeding for one or more offspring cultivars comprising one or more root specifically expressed terpene synthases that increase resistance against pests in the soil and/or one or more root specifically expressed terpene synthases that respond favorably to beneficial microorganisms in the soil, compared to at least one of the parent cultivars.

[0577] A35.7. The method of embodiment A35.6, wherein the one or more offspring cultivars comprises a terpene synthase profile comprising one or more of increased amounts/expression of TPS11JL, TPS49JL, TPS41JL, TPS12JL, TPS11-likeJL, TPS36JL, TPS6JL, TPS37JL and TPS64JL.

[0578] A35.8. The method of any one of embodiments A35 to A35.7 that is a method of breeding for one or more offspring cultivars comprising one or more stem specifically expressed terpene synthases that increase resistance against stem-hosted pests, compared to at least one of the parent cultivars.

[0579] A35.9. The method of embodiment A35.8, wherein the one or more offspring cultivars comprises a terpene synthase profile comprising one or more of increased amounts/expression of TPS63JL, TPS43JL, TPS41JL, TPS6-likeJL, TPS33JL and TPS24JL.

[0580] A35.10. The method of any one of embodiments A35 to A35.9 that is a method of breeding for one or more offspring cultivars comprising one or more herbicidal properties, compared to at least one of the parent cultivars.

[0581] A35.11. The method of embodiment A35.10, wherein the one or more offspring cultivars comprises a terpene profile comprising one or more of increased amounts of geraniol, pilegone, citronellol, borneol and para-cymene.

[0582] A35.12. The method of any one of embodiments A35 to A35.11 that is a method of breeding for one or more offspring cultivars comprising that comprise one or more pesticidal properties, compared to at least one of the parent cultivars.

[0583] A35.13. The method of embodiment A35.12, wherein the one or more offspring cultivars comprises a terpene profile comprising one or more of increased amounts of aromadendrene, α-bisabolol, cedrol, nerolidol, trans-nerolidol and guaiol.

[0584] A36. The method of any one of embodiments A32 to A34, wherein the plant cultivar is selected for having an affinity towards an organism or situation that is identified based on identifying and/or quantifying one or more terpene synthase genes and/or paralogs thereof, determining the expression profile of one or more terpene synthase genes and/or paralogs thereof, determining the production profile of one or more terpenes, determining the production profile of one or more cannabinoids, determining the production profile of one or more flavonoids or a combination thereof.

[0585] A36.1. The method of embodiment A36 that is a method of breeding for one or more offspring cultivars comprising one or more insect pheromonal properties, compared to at least one of the parent cultivars.

[0586] A36.2. The method of embodiment A36.1, wherein the one or more offspring cultivars comprises a terpene profile comprising one or more of increased amounts of endo-borneol, isoborneol, 3-carene, carveol, germacrene B, hedycaryol, menthol, cis-nerolidol, cis-β-ocimene, trans-β-ocimene, sabinene hydrate, α-terpinene, thymol, β-farnesene, α-farnesene, γ-eudesmol, alloaromadendrene, valencene and pulegone.

[0587] A37. The method of embodiment A35 or A36.2, wherein the organism or situation is selected from among exposure to insects, pests, mold, chemicals, mildew, fungi, bacteria, an environmental condition or a geographic location.

[0588] A38. The method of any one of embodiments A32 to A37, wherein the plant cultivar is selected for root-specific, stem-specific, leaf-specific or flower-specific expression of a terpene synthase gene and/or paralog thereof, a terpene, a cannabinoid or a flavonoid based on identifying one or more terpene synthase genes, determining the expression profile of one or more terpene synthase genes, determining the production profile of one or more terpenes, determining the production profile of one or more cannabinoids, determining the production profile of one or more flavonoids or a combination thereof.

[0589] A39. The method of any one of embodiments A1 to A31, further comprising, based on identifying one or more terpene synthase genes and/or paralogs thereof, determining the expression profile of the one or more terpene synthase genes and/or paralogs thereof, determining the production profile of one or more terpenes, determining the production profile of one or more cannabinoids, determining the production profile of one or more flavonoids or a combination thereof, genetically modifying a plant cultivar whereby the expression of at least one terpene synthase gene and/or paralog thereof is inhibited or increased in the plant cultivar.

[0590] A40. The method of embodiment A39, wherein the genetic modification increases the production of at least one terpene or decreases the production of at least one terpene in the plant cultivar.

[0591] A41. The method of embodiment A39 or A40, wherein the plant cultivar is of a Cannabis cultivar.

[0592] A41.1. The method of embodiment A39 or A40, wherein one or more plant cultivars is/are of the family Rosidae.

[0593] A41.2. The method of embodiment A41, wherein the Cannabis cultivar is selected from among one or more of Type 1, Type 2, Type 3, Type 4 and Type 5 cultivars

[0594] A42. The method of any one of embodiments A41 to A41.2, wherein the genetic modification increases the production of at least one cannabinoid or decreases the production of at least one cannabinoid in the plant cultivar.

[0595] A43. The method of any one of embodiments A39 to A42, wherein the genetic modification is for imparting a medicinal use.

[0596] A44. The method of any one of embodiments A39 to A43, wherein the genetic modification is for imparting resistance to an organism or situation.

[0597] A45. The method of any one of embodiments A39 to A43, wherein the genetic modification is for imparting affinity towards an organism or situation.

[0598] A46. The method of embodiment A44 or A45, wherein the organism or situation is selected from among exposure to insects, pests, chemicals, mold, mildew, fungi, bacteria, an environmental condition or a geographic location.

[0599] A47. The method of any one of embodiments A39 to A46, wherein the genetic modification is for imparting root-specific, stem-specific, leaf-specific or flower-specific expression or inhibition of expression of a terpene synthase gene, a terpene, a cannabinoid or a flavonoid.

[0600] A48. The method of any one of embodiments A39 to A47, wherein the genetic modification is by a method comprising CRISPR-cas, Cre-Lox, MiRNA, SIRNA, ShRNA or a combination thereof.

[0601] A49. The method of any one of embodiments A1 to A48, wherein the unique subsequence of at least one terpene synthase gene or paralog thereof is outside the sequence encoding the active site of the terpene synthase gene or paralog thereof.

[0602] A50. The method of any one of embodiments A1 to A48, wherein the unique subsequence of at least one terpene synthase gene or paralog thereof is within the sequence encoding the active site of the terpene synthase gene or paralog thereof.

[0603] B1. A method of producing a daughter plant cultivar, comprising:
[0604] analyzing two or more parent plant cultivars by the method of any one of embodiments A1 to A50;
[0605] based on identifying one or more terpene synthase genes and/or paralogs thereof, determining the expression profile of one or more terpene synthase genes and/or paralogs thereof, determining the production profile of one or more terpenes, determining the production profile of one or more cannabinoids, determining the production profile of one or more flavonoids or a combination thereof, selecting two parent plant cultivars for producing a desired daughter plant cultivar; and
[0606] inbreeding or outcrossing the parent plant cultivars to produce a daughter plant cultivar.

[0607] B2. The method of embodiment B1, wherein the daughter plant cultivar produced has increased expression of at least one terpene synthase gene and/or paralog thereof or decreased expression of at least one terpene synthase gene and/or paralog thereof compared to at least one of the parent plant cultivars.

[0608] B3. The method of embodiment B1 or B2, wherein the daughter plant cultivar produced has increased production of at least one terpene or decreased production of at least one terpene compared to at least one of the parent plant cultivars.

[0609] B4. The method of any one of embodiments B1 to B3, wherein the parent plant cultivars and the daughter plant cultivar are Cannabis cultivars.

[0610] B4.1. The method of any one of embodiments B1 to B3, wherein the parent plant cultivars and the daughter plant cultivar is/are of the family Rosidae.

[0611] B4.2. The method of embodiment B4, wherein the Cannabis cultivar is selected from among one or more of Type 1, Type 2, Type 3, Type 4 and Type 5 cultivars.

[0612] B5. The method of any one of embodiments B4 to B4.2, wherein the daughter plant cultivar produced has increased production of at least one cannabinoid or decreased production of at least one cannabinoid compared to at least one of the parent plant cultivars.

[0613] B6. The method of any one of embodiments B1 to B5, wherein the daughter plant cultivar has a medicinal use that is reduced or absent in the parent plant cultivars.

[0614] B6.1. The method of embodiment AB6, wherein the plant cultivar is selected for a medicinal use that is assigned based on identifying one or more terpene synthase genes, determining the expression profile of one or more terpene synthase genes, and/or determining the production profile of one or more terpenes.

[0615] B6.2. The method of embodiment B6 or B6.1, wherein the medicinal use is selected from among one or more of antioxidant, anti-inflammatory, antibacterial, antiviral, anti-anxiety, antinociceptive, analgesic, antihypertensive, sedative, antidepressant, acetylcholine esterase inhibition (AChEI), neuro-protective and gastro-protective effects.

[0616] B6.3. The method of embodiment B6 or B6.1, wherein the medicinal use is to impart energy, mental clarity, appetite stimulation or appetite suppression.

[0617] B6.4. The method of any one of embodiments B6 to B6.3, wherein sets of between 1-50, 1-45, 1-40, 1-35, 1-30, 1-25, 1-20, 1-15, 1-10, 1-5, 1-4, 1-3, 2 or 1 TPS genes, or 1, 2, 3, 4, 5, 6, 7, 8, 9, 10, 11, 12, 13, 14, 15, 16, 17, 18, 19, 20, 21, 22, 23, 24, 25, 26, 27, 28, 29, 30, 31, 32, 33, 34, 35, 36, 37, 38, 39, 40, 41, 42, 43, 44, 45, 46, 47, 48, 49, 50, 51, 52, 53, 54, 55, 56, 57, 58, 59, 60 or more, up to 100 or more TPS genes are assigned as imparting one or more medicinal uses to a plant cultivar.

[0618] B6.5. The method of any one of embodiments B6 to B6.4, wherein the one or more TPS genes, or sets thereof, produce one or more of the terpenes selected from among α-Bisabolol, endo-Borneol, Camphene, Camphor, 3-Carene, Caryophyllene, Caryophyllene Oxide, α-Cedrene, Cedrol, Citronellol, Eucalyptol (1,8 Cineole), α-Farnesene, β-Farnesene, Fenchol, Fenchone, Geraniol, Geranyl Acetate, Guaiol, Humulene, Isoborneol, Isopulegol, D-Limonene, Linalool, Menthol, β-Myrcene, Nerol, trans-Nerolidol, cis-Nerolidol, trans-Ocimene, cis-Ocimene, α-Phellandrene, Phytol 1, Phytol 2, α-Pinene, β-Pinene, Pulegone, Sabinene, Sabinene Hydrate, α-Terpinene, γ-Terpinene, α-Terpineol, Terpinolene, Valencene, γ-Elemene, Z-Ocimene, E-Ocimene, α-Thujone, Thujene, γ-Muurolene, 2-Norpinene, α-Santalene, α-Selinene, Germacrene D, Eudesma-3,7(11)-diene, δ-Cadinol, trans-α-Beramotene, trans-2-pinanol, p-cymen-8-ol, Sativene, Cyclosativene, α-guaiene, γ-gurjunene, α-bulnesene, Bulnesol, α-eudesmol, β-eudesmol, Hedycaryol, γ-eudesmol, Alloaromadendrene, p-cymene, α-Copaene, β-Elemene, α-Cubebene, Linalyl acetate, Bornyl acetate, Heptacosane, Tricosane, S-Limonene, (−)-Thujopsene, Hashenene 5,5-dimethyl-1-vinylbicyclo[2.1.1]hexane, (−)-englerin A and Artemisinin.

[0619] B6.6. The method of any one of embodiments B6 to B6.5 that is a method of breeding for one or more offspring cultivars that show increased cannabinoid production compared to at least one of the parent cultivars.

[0620] B6.7. The method of embodiment B6.6, wherein the one or more offspring cultivars show reduced expression, or lack of expression, of one or more terpene synthases selected from among TPS13-like2JL, TPS13JL, TPS17JL, TPS30JL, TPS64JL, TPS6-likeJL, TPS6JL, TPS11-likeJL, TPS51JL, TPS30-likeJL, TPS3JL, TPS52JL, TPS5JL, TPS13-like1JL, TPS42JL, TPS1JL, TPS53JL, TPS12JL, TPS40JL, TPS63JL, TPS33JL, TPS61JL, TPS12-likeJL, TPS62JL, TPS2JL, TPS43JL, TPS11JL, TPS38JL, TPS36JL and TPS37JL compared to at least one of the parent cultivars.

[0621] B6.8. The method of any one of embodiments B6 to B6.7 that is a method of breeding for one or more offspring cultivars that produces an increased energetic effect compared to at least one of the parent cultivars.

[0622] B6.9. The method of embodiment B6.8, wherein the one or more offspring cultivars comprises a terpene profile comprising one or more of increased S-linalool production, increased terpinolene production, increased β-ocimene production, α-pinene production greater than β-pinene production, reduced or lack of R-linalool production, reduced or lack of α-terpineol production and reduced or lack of fenchol production compared to at least one of the parent cultivars.

[0623] B6.10. The method of any one of embodiments B6 to B6.9 that is a method of breeding for one or more offspring cultivars that produces an increased sedative effect compared to at least one of the parent cultivars.

[0624] B6.11. The method of embodiment B6.10, wherein the one or more offspring cultivars comprises a terpene profile comprising one or more of: about equal or equal amounts of β-pinene and α-pinene production, increased R-linalool production, increased limonene production, increased trans-nerolidol production, increased terpineol production, increased camphene production, reduced or lack of β-ocimene production, reduced or lack of S-linalool production and reduced or lack of terpinolene production compared to at least one of the parent cultivars.

[0625] B6.12. The method of any one of embodiments B6 to B6.11 that is a method of breeding for one or more offspring cultivars that produces an increased cognitive-enhancing effect compared to at least one of the parent cultivars.

[0626] B6.13. The method of embodiment B6.12, wherein the one or more offspring cultivars comprises a terpene profile comprising one or more of: greater amounts of β-pinene production relative to α-pinene production, increased β-ocimene production and increased eucalyptol production compared to at least one of the parent cultivars.

[0627] B6.14. The method of any one of embodiments B6 to B6.13 that is a method of breeding for one or more offspring cultivars that produces an increased appetite-suppressing effect compared to at least one of the parent cultivars.

[0628] B6.15. The method of embodiment B6.14, wherein the one or more offspring cultivars comprises a terpene profile comprising increased amounts of humulene production compared to at least one of the parent cultivars.

[0629] B6.16. The method of any one of embodiments B6 to B6.15 that is a method of breeding for one or more offspring cultivars that produces an increased anti-inflammatory effect compared to at least one of the parent cultivars.

[0630] B6.17. The method of embodiment B6.16, wherein the one or more offspring cultivars comprises a terpene profile comprising one or more of: increased α-pinene production, increased humulene production and increased β-caryophyllene production compared to at least one of the parent cultivars.

[0631] B6.18. The method of any one of embodiments B6 to B6.17 that is a method of breeding for one or more offspring cultivars that produces an increased anti-anxiety effect compared to at least one of the parent cultivars.

[0632] B6.19. The method of embodiment B6.18, wherein the one or more offspring cultivars comprises a terpene profile comprising one or more of: increased β-pinene production, increased humulene production, increased β-caryophyllene production, increased linalool production, increased nerolidol production and increased limonene production compared to at least one of the parent cultivars.

[0633] B6.20. The method of any one of embodiments B6 to B6.19 that is a method of breeding for one or more offspring cultivars that produces an increased antinociceptive effect compared to at least one of the parent cultivars.

[0634] B6.21. The method of embodiment B6.20, wherein the one or more offspring cultivars comprises a terpene profile comprising one or more of: increased α-bisabolol production, increased α-terpineol production, increased trans nerolidol production, increased α-phellandrene production, and increased eucalyptol production compared to at least one of the parent cultivars.

[0635] B6.22. The method of any one of embodiments B6 to B6.21 that is a method of breeding for one or more offspring cultivars that produces an increased body relaxing effect compared to at least one of the parent cultivars.

[0636] B6.23. The method of embodiment B6.22, wherein the one or more offspring cultivars comprises a terpene profile comprising one or more of: increased α-bisabolol production, increased α-terpineol production, increased trans nerolidol production and increased α-phellandrene production, compared to at least one of the parent cultivars.

[0637] B6.24. The method of any one of embodiments B6 to B6.23 that is a method of breeding for one or more offspring cultivars that produces an increased anti-depressant effect compared to at least one of the parent cultivars.

[0638] B6.25. The method of embodiment B6.24, wherein the one or more offspring cultivars comprises a terpene profile comprising one or more of: equal or about equal amounts of α-pinene and β-pinene production, increased limonene production, increased nerolidol production and increased linalool production, compared to at least one of the parent cultivars.

[0639] B6.26. The method of any one of embodiments B6 to B6.25 that is a method of breeding for one or more offspring cultivars that produces an increased amount of one or more acetyl cholinesterase-inhibitor (AChEI) terpenes compared to at least one of the parent cultivars.

[0640] B6.27. The method of embodiment B6.26, wherein the one or more offspring cultivars comprises a terpene profile comprising one or more of: increased amounts of α-pinene production, increased terpinolene production, increased β-ocimene production, increased 3-carene production, increased α and/or γ-terpinene production and increased sabinene production compared to at least one of the parent cultivars.

[0641] B6.28. The method of any one of embodiments B6 to B6.27 that is a method of breeding for one or more offspring cultivars that produces an increased anti-bacterial effect compared to at least one of the parent cultivars.

[0642] B6.29. The method of embodiment B6.28, wherein the one or more offspring cultivars comprises a terpene profile comprising one or more of: increased amounts of aromadendrene production, increased carvacrol production, increased β-caryophyllene production, increased eucalyptol production, increased fenchol production, increased germacrene D production, increased nerol production, increased pulegone production, increased sabinene production and increased geraniol production compared to at least one of the parent cultivars.

[0643] B6.30. The method of any one of embodiments B6 to B6.29 that is a method of breeding for one or more offspring cultivars that produces an increased anti-microbial effect compared to at least one of the parent cultivars.

[0644] B6.31. The method of embodiment B6.30, wherein the one or more offspring cultivars comprises a terpene profile comprising one or more of: increased amounts of camphor production, increased sabinene hydrate production and increased thymol production compared to at least one of the parent cultivars.

[0645] B6.32. The method of any one of embodiments B6 to B6.31 that is a method of breeding for one or more offspring cultivars that produces an increased fungicidal effect compared to at least one of the parent cultivars.

[0646] B6.33. The method of embodiment B6.32, wherein the one or more offspring cultivars comprises a terpene profile comprising one or more of: increased amounts of citronellol production, increased para-cymene production, increased pulegone production and increased geraniol production compared to at least one of the parent cultivars.

[0647] B6.34. The method of any one of embodiments B6 to B6.33 that is a method of breeding for one or more offspring cultivars that produces an increased expectorant effect compared to at least one of the parent cultivars.

[0648] B6.35. The method of embodiment B6.34, wherein the one or more offspring cultivars comprises a terpene profile comprising one or more of: increased amounts of camphene production, increased sabinene hydrate production and increased geraniol production compared to at least one of the parent cultivars.

[0649] B6.36. The method of any one of embodiments B6 to B6.35 that is a method of breeding for one or more offspring cultivars that produces an increased expectorant effect compared to at least one of the parent cultivars.

[0650] B6.37. The method of embodiment B6.36, wherein the one or more offspring cultivars comprises a terpene profile comprising one or more of: increased amounts of camphene production, increased sabinene hydrate production and increased geraniol production compared to at least one of the parent cultivars.

[0651] B6.38. The method of any one of embodiments B6 to B6.37 that is a method of breeding for one or more offspring cultivars that produces increased non-irritant properties compared to at least one of the parent cultivars.

[0652] B6.39. The method of embodiment B6.38, wherein the one or more offspring cultivars comprises a terpene profile comprising one or more of reduced or absent: borneol, α-cedrene, citronellol or para-cymene, or increased amounts of the counter-irritant fenchone.

[0653] B7. The method of any one of embodiments B1 to B6, wherein the daughter plant cultivar has resistance to an organism or situation, where the resistance is reduced or absent in the parent plant cultivars.

[0654] B7.1. The method of embodiment B7, wherein the plant cultivar is selected for resistance to an organism or situation that is identified based on identifying one or more terpene synthase genes, determining the expression profile of one or more terpene synthase genes, and/or determining the production profile of one or more terpenes.

[0655] B7.2. The method of any one of embodiments B7 or B7.1, wherein sets of between 1-50, 1-45, 1-40, 1-35, 1-30, 1-25, 1-20, 1-15, 1-10, 1-5, 1-4, 1-3, 2 or 1 TPS genes, or 1, 2, 3, 4, 5, 6, 7, 8, 9, 10, 11, 12, 13, 14, 15, 16, 17, 18, 19, 20, 21, 22, 23, 24, 25, 26, 27, 28, 29, 30, 31, 32, 33, 34, 35, 36, 37, 38, 39, 40, 41, 42, 43, 44, 45, 46, 47, 48, 49, 50, 51, 52, 53, 54, 55, 56, 57, 58, 59, 60 or more, up to 100 or more TPS genes are assigned as imparting resistance to an organism or situation to a plant cultivar.

[0656] B7.3. The method of any one of embodiments B7 to B7.2, wherein the one or more TPS genes, or sets thereof, produce one or more of the terpenes selected from among α-Bisabolol, endo-Borneol, Camphene, Camphor, 3-Carene, Caryophyllene, Caryophyllene Oxide, α-Cedrene, Cedrol, Citronellol, Eucalyptol (1,8 Cineole), α-Farnesene, β-Farnesene, Fenchol, Fenchone, Geraniol, Geranyl Acetate, Guaiol, Humulene, Isoborneol, Isopulegol, D-Limonene, Linalool, Menthol, β-Myrcene, Nerol, trans-Nerolidol, cis-Nerolidol, trans-Ocimene, cis-Ocimene, α-Phellandrene, Phytol 1, Phytol 2, α-Pinene, β-Pinene, Pulegone, Sabinene, Sabinene Hydrate, α-Terpinene, γ-Terpinene, α-Terpineol, Terpinolene, Valencene, γ-Elemene, Z-Ocimene, E-Ocimene, α-Thujone, Thujene, γ-Muurolene, 2-Norpinene, α-Santalene, α-Selinene, Germacrene D, Eudesma-3,7(11)-diene, δ-Cadinol, trans-α-Beramotene, trans-2-pinanol, p-cymen-8-ol, Sativene, Cyclosativene, α-guaiene, γ-gurjunene, α-bulnesene, Bulnesol, α-eudesmol, β-eudesmol, Hedycaryol, γ-eudesmol, Alloaromadendrene, p-cymene, α-Copaene, β-Elemene, α-Cubebene, Linalyl acetate, Bornyl acetate, Heptacosane, Tricosane, S-Limonene, (−)-Thujopsene, Hashenene 5,5-dimethyl-1-vinylbicyclo[2.1.1]hexane, (−)-englerin A and Artemisinin.

[0657] B7.4. The method of any one of embodiments B7 to B7.3 that is a method of breeding for one or more offspring cultivars that show increased anti-pathogenic properties compared to at least one of the parent cultivars.

[0658] B7.5. The method of embodiment B7.4, wherein the one or more offspring cultivars comprises a terpene synthase profile comprising one or more of increased amounts/expression of TPS13-like2JL, TPS13JL, TPS17JL, TPS30JL, TPS64JL, TPS6-likeJL, TPS6JL, TPS11-likeJL, TPS51JL, TPS30-likeJL, TPS3JL, TPS52JL, TPS5JL, TPS13-like1JL, TPS42JL, TPS1JL, TPS53JL, TPS12JL, TPS40JL, TPS63JL, TPS33JL, TPS61JL, TPS12-likeJL, TPS62JL, TPS2JL, TPS43JL, TPS11JL, TPS38JL, TPS36JL, TPS37JL.

[0659] B7.6. The method of any one of embodiments B7 to B7.5 that is a method of breeding for one or more offspring cultivars comprising one or more root specifically expressed terpene synthases that increase resistance against pests in the soil and/or one or more root specifically expressed terpene synthases that respond favorably to beneficial microorganisms in the soil, compared to at least one of the parent cultivars.

[0660] B7.7. The method of embodiment B7.6, wherein the one or more offspring cultivars comprises a terpene synthase profile comprising one or more of increased amounts/expression of TPS11JL, TPS49JL, TPS41JL, TPS12JL, TPS11-likeJL, TPS36JL, TPS6JL, TPS37JL and TPS64JL.

[0661] B7.8. The method of any one of embodiments B7 to B7.7 that is a method of breeding for one or more offspring cultivars comprising one or more stem specifically expressed terpene synthases that increase resistance against stem-hosted pests, compared to at least one of the parent cultivars.

[0662] B7.9. The method of embodiment B7.8, wherein the one or more offspring cultivars comprises a terpene synthase profile comprising one or more of increased amounts/expression of TPS63JL, TPS43JL, TPS41JL, TPS6-likeJL, TPS33JL and TPS24JL.

[0663] B7.10. The method of any one of embodiments B7 to B7.9 that is a method of breeding for one or more offspring cultivars comprising one or more herbicidal properties, compared to at least one of the parent cultivars.

[0664] B7.11. The method of embodiment B7.10, wherein the one or more offspring cultivars comprises a terpene profile comprising one or more of increased amounts of geraniol, pilegone, citronellol, borneol and para-cymene.

[0665] B7.12. The method of any one of embodiments B7 to B7.11 that is a method of breeding for one or more offspring cultivars comprising that comprise one or more pesticidal properties, compared to at least one of the parent cultivars.

[0666] B7.13. The method of embodiment B7.12, wherein the one or more offspring cultivars comprises a terpene profile comprising one or more of increased amounts of aromadendrene, α-bisabolol, cedrol, nerolidol, trans-nerolidol and guaiol.

[0667] B8. The method of any one of embodiments B1 to B6, wherein the daughter plant cultivar has affinity towards an organism or situation, where the affinity is reduced or absent in the parent plant cultivars.

[0668] B8.1. The method of embodiment B8 that is a method of breeding for one or more offspring cultivars comprising one or more insect pheromonal properties, compared to at least one of the parent cultivars.

[0669] B8.2. The method of embodiment B8.1, wherein the one or more offspring cultivars comprises a terpene profile comprising one or more of increased amounts of endo-borneol, isoborneol, 3-carene, carveol, germacrene B, hedycaryol, menthol, cis-nerolidol, cis-β-ocimene, trans-β-ocimene, sabinene hydrate, α-terpinene, thymol, β-farnesene, α-farnesene, γ-eudesmol, alloaromadendrene, valencene and pulegone.

[0670] B9. The method of embodiment B7 or B8, wherein the organism or situation is selected from among exposure to insects, pests, mold, chemicals, mildew, fungi, bacteria, an environmental condition or a geographic location.

[0671] B10. The method of any one of embodiments B1 to B9, wherein the daughter plant cultivar has increased root-specific, stem-specific, leaf-specific or flower-specific expression or inhibition of expression of a terpene synthase gene, a terpene, a cannabinoid or a flavonoid compared to at least one of the parent plant cultivars.

[0672] C1. A method of genetically modifying a plant cultivar, comprising:
[0673] analyzing the plant cultivar by the method of any one of embodiments A1 to A49.1; and
[0674] based on the analysis, altering at least one unique subsequence of at least one terpene synthase gene or a paralog thereof, whereby expression of the at least one terpene synthase gene or paralog thereof is increased or decreased compared to in the absence of the alteration and whereby one or more of the terpene synthase gene and/or paralog thereof expression profile, the terpene production profile, the cannabinoid production profile or the flavonoid production profile of the plant is modified.

[0675] C2. The method of embodiment C1, wherein the genetically modified plant cultivar has increased expression of at least one terpene synthase gene or a paralog thereof or decreased expression of at least one terpene synthase gene or a paralog thereof, compared to the unmodified plant cultivar.

[0676] C3. The method of embodiment C1 or C2, wherein the genetically modified plant cultivar has increased production of at least one terpene or decreased production of at least one terpene compared to the unmodified plant cultivar.

[0677] C4. The method of any one of embodiments C1 to C3, wherein the plant cultivar that is genetically modified is of a Cannabis cultivar.

[0678] C5. The method of embodiment C4, wherein the genetically modified plant cultivar has increased production of at least one cannabinoid or decreased production of at least one cannabinoid compared to the unmodified plant cultivar.

[0679] C6. The method of any one of embodiments C1 to C5, wherein the genetically modified plant cultivar has a medicinal use that is less than or absent in the unmodified plant cultivar.

[0680] C7. The method of any one of embodiments C1 to C6, wherein the genetically modified plant cultivar has increased resistance to an organism or situation, where the resistance is less than or absent in the unmodified plant cultivar.

[0681] C8. The method of any one of embodiments C1 to C6, wherein the genetically modified plant cultivar has increased affinity towards an organism or situation, where the affinity is less than or absent in the unmodified plant cultivar.

[0682] C9. The method of embodiment C7 or C8, wherein the organism or situation is selected from among exposure to insects, pests, mold, chemicals, mildew, fungi, bacteria, an environmental condition or a geographic location.

[0683] C10. The method of any one of embodiments C1 to C9, wherein the genetically modified plant cultivar has increased root-specific, stem-specific, leaf-specific or flower-specific expression or inhibition of expression of a terpene synthase gene, a terpene, a cannabinoid or a flavonoid compared to the unmodified plant cultivar.

[0684] C11. The method of any one of embodiments C1 to C10, wherein the genetic modification is by a method comprising CRISPR-cas, Cre-Lox, MiRNA, SIRNA, ShRNA or a combination thereof.

[0685] C12. The method of any one of embodiments C1 to C11, wherein the expression of two or more terpene synthase genes and/or paralogs thereof is specifically increased or specifically inhibited.

[0686] D1. A method of analyzing a gene of a plant cultivar that belongs to a family of genes, wherein the gene comprises two or more exons, the method comprising:
[0687] (a) obtaining a nucleic acid sample from the plant cultivar;
[0688] (b) contacting the nucleic acid sample with at least one polynucleotide primer pair under amplification conditions, thereby preparing a mixture, wherein the polynucleotide primer pair hybridizes to a unique exon of the gene or a portion thereof, wherein the unique exon of the gene is different than the other exons of the gene and the unique exon of the gene is different than the exons of the other genes in the gene family;
[0689] (c) amplifying the mixture, thereby obtaining an amplified mixture; and
[0690] (d) analyzing the amplified mixture of (c), whereby the gene of the plant cultivar is identified and/or quantified in the amplified mixture.

[0691] D1.1 A method of analyzing a family of genes of a plant cultivar, wherein each gene of the family comprises two or more exons, the method comprising:
[0692] (a) obtaining a nucleic acid sample from the plant cultivar;
[0693] (b) contacting the nucleic acid sample with at least one polynucleotide primer pair under amplification conditions, thereby preparing a mixture, wherein the polynucleotide primer pair hybridizes to a unique exon of a gene or a portion thereof, wherein the unique exon of the gene is different than the other exons of the gene and the unique exon of the gene is different than the exons of the other genes in the family of genes;
[0694] (c) amplifying the mixture, thereby obtaining an amplified mixture; and
[0695] (d) analyzing the amplified mixture of (c), whereby at least one gene of the family of genes is identified and/or quantified in the amplified mixture.

[0696] D2. The method of embodiment D1 or D1.1, wherein the family of genes comprises terpene synthase genes and/or paralogs thereof.

[0697] E1. A solid support comprising a single-stranded polynucleotide species, wherein the single-stranded polynucleotide species specifically binds to a unique subsequence of a terpene synthase gene or a paralog thereof, wherein the unique subsequence of the terpene synthase gene or paralog thereof is different than the other subsequences of the terpene synthase gene or paralog thereof and the unique subsequence of the terpene synthase gene or paralog thereof is different than the subsequences of other terpene synthase genes and/or paralogs thereof.

[0698] E2. The solid support of embodiment E1, wherein the single-stranded polynucleotide species specifically binds to a conserved region of the unique subsequence.

[0699] E3. The solid support of embodiment E1 or E2, wherein the unique subsequence is an exon, an intron, a portion within an exon or a portion within an intron.

[0700] E4. The solid support of any one of embodiments E1 to E3, wherein the unique subsequence is an exon or a portion within an exon.

[0701] E5. The solid support of any one of embodiments E1 to E4, wherein the single-stranded polynucleotide species is selected from among SEQ ID NOS: 1-1284.

[0702] E5.1 The solid support of any one of embodiments E1 to E5, wherein the single-stranded polynucleotide species is selected from among those set forth in SEQ ID NOS: 1-1284, or from among sequences that share 90%, 91%, 92%, 93%, 94%, 95%, 96%, 97%, 98%, 99% or more identity with any of the sequences set forth in SEQ ID NOS: 1-1284.

[0703] E6. The solid support of any one of embodiments E1 to E5.1, wherein the terpene synthase gene or paralog thereof is a monoterpene synthase gene or paralog thereof, a diterpene synthase gene or paralog thereof or a sesquiterpene synthase gene or paralog thereof.

[0704] E7. The solid support of any one of embodiments E1 to E6, wherein the single-stranded polynucleotide species specifically binds to a unique subsequence of a terpene synthase gene or a paralog thereof from a Cannabis cultivar.

[0705] E8. The solid support of any one of embodiments E1 to E7 that is a bead, column, capillary, disk, filter, dipstick, membrane, wafer, comb, pin or a chip.

[0706] E9. The solid support of any one of embodiments E1 to E8 that comprises a material selected from among silicon, silica, glass, controlled-pore glass (CPG), nylon, Wang resin, Merrifield resin, Sephadex, Sepharose, cellulose, magnetic beads, Dynabeads, a metal, a metal surface, a plastic or polymer or combinations thereof.

[0707] E10. The solid support of any one of embodiments E1 to E9, wherein the unique subsequence of at least one terpene synthase gene or paralog thereof is outside the sequence encoding the active site of the terpene synthase gene or paralog thereof.

[0708] E11. The solid support of any one of embodiments E1 to E9, wherein the unique subsequence of at least one terpene synthase gene or paralog thereof is within the sequence encoding the active site of the terpene synthase gene or paralog thereof.

[0709] F1. A collection of solid supports of any one of embodiments E1 to E10, wherein:
[0710] (a) each solid support in the collection comprises a single-stranded polynucleotide species, wherein the single-stranded polynucleotide species specifically binds to a unique subsequence of a terpene synthase gene or a paralog thereof, wherein the unique subsequence of the terpene synthase gene or paralog thereof is different than the other subsequences of the terpene synthase gene or paralog thereof and the unique subsequence of the terpene synthase gene or paralog thereof is different than the subsequences of other terpene synthase genes and/or paralogs thereof; and
[0711] (b) the single-stranded polynucleotide species of each solid support in the collection is different than the single-stranded polynucleotide species of the other solid supports in the collection.

[0712] F2. The collection of embodiment F1, wherein each single-stranded polynucleotide species in the collection specifically binds to a unique subsequence of the same terpene synthase gene or paralog thereof.

[0713] F3. The collection of embodiment F1, wherein each single-stranded polynucleotide species specifically binds to a unique subsequence of a terpene synthase gene or a paralog thereof that is different than the terpene synthase genes and/or paralogs thereof to which the other single-stranded polynucleotide species in the collection bind.

[0714] F4. The collection of embodiment F1, comprising at least two single-stranded polynucleotide species that specifically bind to unique subsequences of the same terpene synthase gene and/or paralog thereof or at least two single-stranded polynucleotide species that specifically bind to unique subsequences of two different terpene synthase genes and/or paralogs thereof.

[0715] F5. The collection of any one of embodiments F1 to F4, wherein each of the single-stranded polynucleotide species specifically binds to a conserved region of the unique subsequence.

[0716] F6. The collection of any one of embodiments F1 to F5, wherein the unique subsequence is an exon, an intron, a portion within an exon or a portion within an intron.

[0717] F7. The collection of any embodiments F1 to F6, wherein the subsequence is an exon or a portion within an exon.

[0718] F8. The collection of any one of embodiments F1 to F7, wherein the single-stranded polynucleotide species are selected from among SEQ ID NOS: 1-1284.

[0719] F8.1 The collection of any one of embodiments F1 to F8, wherein the single-stranded polynucleotide species are selected from among those set forth in SEQ ID NOS: 1-1284, or from among sequences that share 90%, 91%, 92%, 93%, 94%, 95%, 96%, 97%, 98%, 99% or more identity with any of the sequences set forth in SEQ ID NOS: 1-1284.

[0720] F9. The collection of any one of embodiments F1 to F8.1, wherein the terpene synthase genes and/or paralogs thereof are monoterpene synthase genes and/or paralogs thereof, diterpene synthase genes and/or paralogs thereof, sesquiterpene synthase genes and/or paralogs thereof, or any combination thereof.

[0721] F10. The collection of any one of embodiments F1 to F9, wherein all or a portion of the single-stranded polynucleotide species specifically binds to a unique subsequence of a terpene synthase gene or a paralog thereof from a Cannabis cultivar.

[0722] F11. The collection of any one of embodiments F1 to F10, wherein the solid supports are arranged in an array.

[0723] F12. The collection of embodiment F11, wherein the array is on a chip.

[0724] G1. A method of analyzing the terpene synthase gene profile of a plant cultivar, comprising:
[0725] (a) obtaining a nucleic acid sample from the plant cultivar;
[0726] (b) contacting the nucleic acid sample with the collection of any of embodiments F1 to F12, thereby preparing a mixture, wherein each single-stranded polynucleotide species of the collection can specifically bind to a unique subsequence of a terpene synthase gene or a paralog thereof, wherein the unique subsequence of the terpene synthase gene or a paralog thereof is different than the other subsequences of the terpene synthase gene or paralog thereof and the unique subsequence of the terpene synthase gene is different than the subsequences of other terpene synthase genes and/or paralogs thereof; and
[0727] (c) subjecting the mixture to conditions that facilitate specific binding of each single-stranded polynucleotide species of the collection to its corresponding unique subsequence of a terpene synthase gene or paralog thereof, when the unique subsequence is present in the nucleic acid sample, thereby obtaining a collection comprising bound single-stranded polynucleotide species; and
[0728] (d) analyzing the collection comprising bound single-stranded polynucleotide species of (c), whereby at least one terpene synthase gene or a paralog thereof is identified and/or quantified, and the terpene synthase gene profile of the plant cultivar is determined.

[0729] G2. The method of embodiment G1, wherein each single-stranded polynucleotide species of the collection binds to a conserved region of its corresponding unique subsequence.

[0730] G3. The method of embodiment G1 or G2, wherein the unique subsequence is an exon, an intron, a portion within an exon or a portion within an intron.

[0731] G4. The method of any one of embodiments G1 to G3, wherein the subsequence is an exon or a portion within an exon.

[0732] G5. The method of any one of embodiments G1 to G4, wherein the identification in (d) is by a signal that is generated when a single-stranded polynucleotide species of the collection binds to its corresponding unique subsequence.

[0733] G5.1 The method of embodiment G5, wherein the signal is an electrical signal, an electronic signal, from an optical label or from a radiolabel.

[0734] G6. The method of any one of embodiments G1 to G5.1, wherein the single-stranded polynucleotide species are selected from among SEQ ID NOS: 1-1284.

[0735] G6.1 The method of any one of embodiments G1 to G6, wherein the single-stranded polynucleotide species are selected from among those set forth in SEQ ID NOS: 1-1284, or from among sequences that share 90%, 91%, 92%, 93%, 94%, 95%, 96%, 97%, 98%, 99% or more identity with any of the sequences set forth in SEQ ID NOS: 1-1284.

[0736] G7. The method of any one of embodiments G1 to G6.1, wherein the terpene synthase genes and/or paralogs thereof that are identified and/or quantified in the terpene synthase gene profile are monoterpene synthase genes and/or paralogs thereof, diterpene synthase genes and/or paralogs thereof, sesquiterpene synthase genes and/or paralogs thereof or any combination thereof.

[0737] G8. The method of any one of embodiments G1 to G7, wherein, based on the terpene synthase gene profile that is obtained, the terpene synthase gene and/or paralog expression profile and/or the terpene production profile of the plant cultivar is determined.

[0738] G9. The method of embodiment G8, wherein the terpene synthase gene expression profile and/or the terpene production profile is of the root, flower, stem, leaf or any combination thereof.

[0739] G10. The method of any one of embodiments G1 to G9, wherein, based on the terpene synthase gene profile that is obtained and/or based on the terpene synthase gene expression profile that is determined and/or based on the terpene production profile that is determined, a lineage of the plant cultivar is assigned.

[0740] G11. The method of any one of embodiments G1 to G10, wherein, based on the terpene synthase gene profile that is obtained and/or based on the terpene synthase gene expression profile that is determined and/or based on the terpene production profile that is determined, a medicinal use of the plant cultivar is assigned.

[0741] G12. The method of any one of embodiments G1 to G11, wherein, based on the terpene synthase gene profile that is obtained and/or based on the terpene synthase gene expression profile that is determined and/or based on the terpene production profile that is determined, the plant cultivar is identified as resistant to an organism or situation.

[0742] G13. The method of embodiment G12, wherein the organism or situation is selected from among exposure to insects, pests, chemicals, mold, mildew, fungi, bacteria, an environmental condition or a geographic location.

[0743] G14. The method of any one of embodiments G1 to G11, wherein, based on the terpene synthase gene profile that is obtained and/or based on the terpene synthase gene and/or paralog expression profile that is determined and/or based on the terpene production profile that is determined, the plant cultivar is identified as having affinity towards an organism or situation.

[0744] G15. The method of embodiment G14, wherein the organism or situation is selected from among exposure to insects, pests, chemicals, mold, mildew, fungi, bacteria, an environmental condition or a geographic location.

[0745] G16. The method of any one of embodiments G1 to G15, wherein a plurality of plant cultivars are analyzed.

[0746] G17. The method of embodiment G16, wherein the plant cultivars are of the same species.

[0747] G18. The method of embodiment G16 or G17, comprising classifying the plurality of plant cultivars based on lineage.

[0748] G19. The method of any one of embodiments G16 to G18, comprising classifying the plurality of plant cultivars based on medicinal use.

[0749] G20. The method of any one of embodiments G1 to G19, wherein one or more of the plant cultivars is/are a Cannabis cultivar.

[0750] G21. The method of embodiment G20, wherein the monoterpene synthase gene and/or paralog profile of the Cannabis plant cultivar is obtained and, based on the monoterpene synthase gene and/or paralog profile obtained and/or the expression profile of the identified and/or quantified monoterpene synthase genes and/or paralogs thereof, the terpene production profile, the cannabinoid production profile, the flavonoid production profile, or the combination of two or more of the terpene production profile, the cannabinoid production profile and the flavonoid production profile of the Cannabis plant cultivar is determined.

[0751] G22. The method of embodiment G21, wherein, based on the monoterpene synthase gene and/or paralog profile obtained, the expression profile of the identified and/or quantified monoterpene synthase genes and/or paralogs thereof, the cannabinoid production profile, the flavonoid production profile, or the cannabinoid production profile and the flavonoid production profile that is determined, a lineage of the Cannabis plant cultivar is assigned.

[0752] G23. The method of embodiment G21 or G22, wherein, based on the monoterpene synthase gene and/or paralog profile obtained, the expression profile of the identified and/or quantified monoterpene synthase genes and/or paralogs thereof, the cannabinoid production profile, the flavonoid production profile, or the cannabinoid production profile and the flavonoid production profile that is determined, a medicinal use of the Cannabis plant cultivar is assigned.

[0753] G24. The method of any one of embodiments G20 to G23, wherein a plurality of Cannabis plant cultivars are analyzed.

[0754] G25. The method of embodiment G24, comprising classifying the plurality of Cannabis plant cultivars based on lineage.

[0755] G26. The method of embodiment G24, comprising classifying the plurality of plant cultivars based on medicinal use.

[0756] G27. The method of any one of embodiments G1 to G26, wherein at least one plant cultivar that is analyzed produces one or more terpenes selected from among α-Bisabolol, endo-Borneol, Camphene, Camphor, 3-Carene, Caryophyllene, Caryophyllene Oxide, α-Cedrene, Cedrol, Citronellol, Eucalyptol (1,8 Cineole), α-Farnesene, β-Farnesene, Fenchol, Fenchone, Geraniol, Geranyl Acetate, Guaiol, Humulene, Isoborneol, Isopulegol, D-Limonene, Linalool, Menthol, β-Myrcene, Nerol, trans-Nerolidol, cis-Nerolidol, trans-Ocimene, cis-Ocimene, α-Phellandrene, Phytol 1, Phytol 2, α-Pinene, β-Pinene, Pulegone, Sabinene, Sabinene Hydrate, α-Terpinene, γ-Terpinene, α-Terpineol, Terpinolene, Valencene, γ-Elemene, Z-Ocimene, E-Ocimene, α-Thujone, Thujene, γ-Muurolene, 2-Norpinene, α-Santalene, α-Selinene, Germacrene D, Eudesma-3,7(11)-diene, δ-Cadinol, trans-α-Beramotene, trans-2-pinanol, p-cymen-8-ol, Sativene, Cyclosativene, α-guaiene, γ-gurjunene, α-bulnesene, Bulnesol, α-eudesmol, β-eudesmol, Hedycaryol, γ-eudesmol, Alloaromadendrene, p-cymene, α-Copaene, β-Elemene, α-Cubebene, Linalyl acetate, Bornyl acetate, Heptacosane, Tricosane, S-Limonene, (−)-Thujopsene, Hashenene 5,5-dimethyl-1-vinylbicyclo[2.1.1]hexane, (−)-englerin A and Artemisinin.

[0757] G28. The method of any one of embodiments G8 to G26, wherein a terpene production profile is determined for one or more terpenes selected from among α-Bisabolol, endo-Borneol, Camphene, Camphor, 3-Carene, Caryophyllene, Caryophyllene Oxide, α-Cedrene, Cedrol, Citronellol, Eucalyptol (1,8 Cineole), α-Farnesene, β-Farnesene, Fenchol, Fenchone, Geraniol, Geranyl Acetate, Guaiol, Humulene, Isoborneol, Isopulegol, D-Limonene, Linalool, Menthol, β-Myrcene, Nerol, trans-Nerolidol, cis-Nerolidol, trans-Ocimene, cis-Ocimene, α-Phellandrene, Phytol 1, Phytol 2, α-Pinene, β-Pinene, Pulegone, Sabinene, Sabinene Hydrate, α-Terpinene, γ-Terpinene, α-Terpineol, Terpinolene, Valencene, γ-Elemene, Z-Ocimene, E-Ocimene, α-Thujone, Thujene, γ-Muurolene, 2-Norpinene, α-Santalene, α-Selinene, Germacrene D, Eudesma-3,7(11)-diene, δ-Cadinol, trans-α-Beramotene, trans-2-pinanol, p-cymen-8-ol, Sativene, Cyclosativene, α-guaiene, γ-gurjunene, α-bulnesene, Bulnesol, α-eudesmol, β-eudesmol, Hedycaryol, γ-eudesmol, Alloaromadendrene, p-cymene, α-Copaene, β-Elemene, α-Cubebene, Linalyl acetate, Bornyl acetate, Heptacosane, Tricosane, S-Limonene, (−)-Thujopsene, Hashenene 5,5-dimethyl-1-vinylbicyclo[2.1.1]hexane, (−)-englerin A and Artemisinin.

[0758] G29. The method of any one of embodiments G1 to G28, wherein at least one plant cultivar that is analyzed expresses one or more terpene synthases selected from among TPS11, TPS11-like, TPS12, TPS12-like, TPS13, TPS13-like, TPS13-like2, TPS14, TPS15, TPS16, TPS17, TPS18, TPS19, TPS1, TPS20, TPS23, TPS24, TPS2, TPS30, TPS30-like, TPS32, TPS33, TPS36, TPS37, TPS38, TPS39, TPS3, TPS40, TPS41, TPS42, TPS43, TPS44, TPS45, TPS46, TPS47, TPS48, TPS49, TPS4, TPS4-like, TPS50, TPS51, TPS52, TPS53, TPS54, TPS55, TPS56, TPS57, TPS58, TPS59, TPS5, TPS5, TPS60, TPS61, TPS62, TPS63, TPS64, TPS6, TPS6-like, TPS7, TPS8, TPS8, TPS8-like, TPS9, TPS9, TPS9-like and TPS9-like2.

[0759] G30. The method of any one of embodiments G1 to G29, further comprising, based on obtaining the terpene synthase gene and/or paralog profile, determining the expression profile of one or more terpene synthase genes and/or paralogs thereof, determining the production profile of one or more terpenes, determining the production profile of one or more cannabinoids, determining the production profile of one or more flavonoids or a combination thereof, selecting a plant cultivar for in-breeding or out-crossing.

[0760] G31. The method of embodiment G30, wherein the plant cultivar is selected for its lineage that is assigned based on obtaining the terpene synthase gene profile, determining the expression profile of one or more terpene synthase genes, determining the production profile of one or more terpenes, determining the production profile of one or more cannabinoids, determining the production profile of one or more flavonoids or a combination thereof.

[0761] G32. The method of embodiment G30 or G31, wherein the plant cultivar is selected for a medicinal use that is assigned based on obtaining the terpene synthase gene profile, determining the expression profile of one or more terpene synthase genes, determining the production profile of one or more terpenes, determining the production profile of one or more cannabinoids, determining the production profile of one or more flavonoids or a combination thereof.

[0762] G33. The method of any one of embodiments G30 to G32, wherein the plant cultivar is selected for resistance to an organism or situation that is identified based on obtaining the terpene synthase gene profile, determining the expression profile of one or more terpene synthase genes, determining the production profile of one or more terpenes, determining the production profile of one or more cannabinoids, determining the production profile of one or more flavonoids or a combination thereof.

[0763] G34. The method of any one of embodiments G30 to G32, wherein the plant cultivar is selected for having an affinity towards an organism or situation that is identified based on obtaining the terpene synthase gene profile, determining the expression profile of one or more terpene synthase genes, determining the production profile of one or more terpenes, determining the production profile of one or more cannabinoids, determining the production profile of one or more flavonoids or a combination thereof.

[0764] G35. The method of embodiment G33 or G34, wherein the organism or situation is selected from among insects, pests, mold, mildew, fungi, bacteria, an environmental condition or a geographic location.

[0765] G36. The method of any one of embodiments G30 to G35, wherein the plant cultivar is selected for root-specific, stem-specific, leaf-specific or flower-specific expression of a terpene synthase, a terpene, a cannabinoid or a flavonoid based on obtaining the terpene synthase gene profile, determining the expression profile of one or more terpene synthase genes, determining the production profile of one or more terpenes, determining the production profile of one or more cannabinoids, determining the production profile of one or more flavonoids or a combination thereof.

[0766] G37. The method of any one of embodiments G1 to G29, further comprising, based on obtaining the terpene synthase gene profile, determining the expression profile of one or more terpene synthase genes, determining the production profile of one or more terpenes, determining the production profile of one or more cannabinoids, determining the production profile of one or more flavonoids or a combination thereof, genetically modifying a plant cultivar whereby the expression of at least one terpene synthase gene is inhibited or increased in the plant cultivar.

[0767] G38. The method of embodiment G37, wherein the genetic modification increases the production of at least one terpene or decreases the production of at least one terpene in the plant cultivar.

[0768] G39. The method of embodiment G37 or G38, wherein the plant cultivar is of a Cannabis cultivar.

[0769] G40. The method of embodiment G39, wherein the genetic modification increases the production of at least one cannabinoid or decreases the production of at least one cannabinoid in the plant cultivar.

[0770] G41. The method of any one of embodiments G37 to G40, wherein the genetic modification is for imparting a medicinal use.

[0771] G42. The method of any one of embodiments G37 to G41, wherein the genetic modification is for imparting resistance to an organism or situation.

[0772] G43. The method of any one of embodiments G37 to G41, wherein the genetic modification is for imparting affinity towards an organism or situation.

[0773] G44. The method of embodiment G42 or G43, wherein the organism or situation is selected from among insects, pests, mold, mildew, fungi, bacteria, an environmental condition or a geographic location.

[0774] G45. The method of any one of embodiments G37 to G44, wherein the genetic modification is for imparting root-specific, stem-specific, leaf-specific or flower-specific expression or inhibition of expression of a terpene synthase gene, a terpene, a cannabinoid or a flavonoid.

[0775] G46. The method of any one of embodiments G37 to G45, wherein the genetic modification is by a method comprising CRISPR-cas9, Cre-Lox, MiRNA, SIRNA, ShRNA or a combination thereof.

[0776] G47. The method of any one of embodiments G1 to G46, wherein the unique subsequence of at least one terpene synthase gene is outside the sequence encoding the active site of the terpene synthase gene.

[0777] H1. A method of producing a daughter plant cultivar, comprising:
[0778] analyzing two or more parent plant cultivars by the method of any one of embodiments G1 to G29;
[0779] based on obtaining the terpene synthase gene profile, determining the expression profile of one or more terpene synthase genes, determining the production profile of one or more terpenes, determining the production profile of one or more cannabinoids, determining the production profile of one or more flavonoids or a combination thereof, selecting two parent plant cultivars for producing a desired daughter plant cultivar; and
[0780] inbreeding or outcrossing the parent plant cultivars to produce a daughter plant cultivar.

[0781] H2. The method of embodiment H1, wherein the daughter plant cultivar produced has increased expression of at least one terpene synthase gene or decreased expression of at least one terpene synthase gene compared to at least one of the parent plant cultivars.

[0782] H3. The method of embodiment H1 or H2, wherein the daughter plant cultivar produced has increased production of at least one terpene or decreased production of at least one terpene compared to at least one of the parent plant cultivars.

[0783] H4. The method of any one of embodiments H1 to H3, wherein the parent plant cultivars and the daughter plant cultivar are Cannabis cultivars.

[0784] H5. The method of embodiment H4, wherein the daughter plant cultivar produced has increased production of at least one cannabinoid or decreased production of at least one cannabinoid compared to at least one of the parent plant cultivars.

[0785] H6. The method of any one of embodiments H1 to H5, wherein the daughter plant cultivar has a medicinal use that is reduced or absent in the parent plant cultivars.

[0786] H7. The method of any one of embodiments H1 to H6, wherein the daughter plant cultivar has resistance to an organism or situation, where the resistance is reduced or absent in the parent plant cultivars.

[0787] H8. The method of any one of embodiments H1 to H6, wherein the daughter plant cultivar has affinity towards an organism or situation, where the affinity is reduced or absent in the parent plant cultivars.

[0788] H9. The method of embodiment H7 or H8, wherein the organism or situation is selected from among insects, pests, mold, mildew, fungi, bacteria, an environmental condition or a geographic location.

[0789] H10. The method of any one of embodiments H1 to H9, wherein the daughter plant cultivar has increased root-specific, stem-specific, leaf-specific or flower-specific expression or inhibition of expression of a terpene synthase gene, a terpene, a cannabinoid or a flavonoid compared to at least one of the parent plant cultivars.

[0790] I1. A kit, comprising:
[0791] one or more single-stranded polynucleotide species, wherein each single-stranded polynucleotide species specifically binds to a unique subsequence of a terpene synthase gene, wherein the unique subsequence of the terpene synthase gene is different than the other subsequences of the terpene synthase gene and the unique subsequence of the terpene synthase gene is different than the subsequences of other terpene synthase genes; and
[0792] instructions for use in obtaining a terpene synthase gene profile of a plant cultivar.

[0793] I2. The kit of embodiment I1, wherein the single-stranded polynucleotide species specifically binds to a conserved region of the unique subsequence.

[0794] I3. The kit of embodiment I1 or I2, wherein the unique subsequence is an exon, an intron, a portion within an exon or a portion within an intron.

[0795] I4. The kit of any one of embodiments I1 to I3, wherein the unique subsequence is an exon or a portion within an exon.

[0796] I5. The kit of any one of embodiments I1 to I4, wherein the single-stranded polynucleotide species is selected from among one or more of SEQ ID NOS: 1-1284.

[0797] I5.0. The kit of any one of embodiments I1 to I4, wherein the single-stranded polynucleotide species is selected from among one or more of SEQ ID NOS: 1328-1338.

[0798] I5.01. The kit of any one of embodiments I1 to I4, wherein the single-stranded polynucleotide species is selected from among one or more of SEQ ID NOS: 1285-1327.

[0799] I5.02. The kit of any one of embodiments I1 to I4, comprising one or more sets of single-stranded polynucleotide species, wherein the sets are selected from among SEQ ID NOS: 1285-1293; SEQ ID NOS: 1294-1302; SEQ ID NOS: 1303-1311; SEQ ID NOS: 1312-1319; and SEQ ID NOS: 1320-1327.

[0800] I5.1 The kit of any one of embodiments I1 to I5.02, wherein the single-stranded polynucleotide species or sets of single-stranded polynucleotide species is selected from among those set forth in SEQ ID NOS: 1-1284, SEQ ID NOS: 1328-1338, SEQ ID NOS: 1285-1327, sets of single-stranded polynucleotide species selected from among SEQ ID NOS: 1285-1293; SEQ ID NOS: 1294-1302; SEQ ID NOS: 1303-1311; SEQ ID NOS: 1312-1319; and SEQ ID NOS: 1320-1327, or from among sequences that share 90%, 91%, 92%, 93%, 94%, 95%, 96%, 97%, 98%, 99% or more identity with any of the sequences set forth in SEQ ID NOS: 1-1284, SEQ ID NOS: 1328-1338, SEQ ID NOS: 1285-1327, and sets of single-stranded polynucleotide species selected from among SEQ ID NOS: 1285-1293; SEQ ID NOS: 1294-1302; SEQ ID NOS: 1303-1311; SEQ ID NOS: 1312-1319; and SEQ ID NOS: 1320-1327.

[0801] I6. The kit of any one of embodiments I1 to I5.1, wherein the terpene synthase gene is a monoterpene synthase gene, a diterpene synthase gene or a sesquiterpene synthase gene.

[0802] I7. The kit of any one of embodiments I1 to I6, wherein each single-stranded polynucleotide species specifically binds to a unique subsequence of a terpene synthase gene from a Cannabis cultivar.

[0803] I8. The kit of any one of embodiments I1 to I7, further comprising an electrical detection label, an electronic detection label, an optical label, such as a chromophore, a dye, or a fluorescent label, or a radiolabel for detecting the specific binding of each single-stranded polynucleotide species to a corresponding unique subsequence of a terpene synthase.

[0804] I9. The kit of any one of embodiments I1 to I8, wherein if more than one single-stranded polynucleotide species is present, the single-stranded polynucleotide species bind to different unique subsequences of the same terpene synthase gene, to different unique subsequences of different terpene synthase genes, or to different unique subsequences of the same terpene synthase gene and to different unique subsequences of different terpene synthase genes.

[0805] I10. The kit of any one of embodiments I1 to I9, wherein the unique subsequence of at least one terpene synthase gene is outside the sequence encoding the active site of the terpene synthase gene.

[0806] J1. A kit, comprising:
[0807] one or more polynucleotide primer pairs, wherein each polynucleotide primer pair hybridizes to a unique subsequence of a terpene synthase gene, wherein the unique subsequence of the terpene synthase gene is different than the other subsequences of the terpene synthase gene and the unique subsequence of the terpene synthase gene is different than the subsequences of other terpene synthase genes; and
[0808] instructions for use in analyzing the nucleic acid of a plant cultivar.

[0809] J2. The kit of embodiment J1, wherein each of the primers of a polynucleotide primer pair hybridizes to a conserved region of the subsequence and the hybridized polynucleotide primer pair flanks a variable region of the subsequence.

[0810] J3. The kit of embodiment J1 or J2, wherein the unique subsequence is an exon, an intron, a portion within an exon or a portion within an intron.

[0811] J4. The kit of any one of embodiments J1 to J3, wherein the unique subsequence is an exon or a portion within an exon.

[0812] J5. The kit of any one of embodiments J1 to J4, wherein each primer pair is selected from among SEQ ID NOS: 1-1284.

[0813] J5.1. The kit of any one of embodiments J1 to J5, wherein each primer pair is selected from among those set forth in SEQ ID NOS: 1-1284, or from among sequences that share 90%, 91%, 92%, 93%, 94%, 95%, 96%, 97%, 98%, 99% or more identity with any of the sequences set forth in SEQ ID NOS: 1-1284.

[0814] J6. The kit of any one of embodiments J1 to J5.1, wherein the terpene synthase gene is a monoterpene synthase gene, a diterpene synthase paralog or a sesquiterpene synthase paralog.

[0815] J7. The kit of any one of embodiments J1 to J6, wherein each polynucleotide primer pair specifically binds to a unique subsequence of a terpene synthase paralog from a Cannabis cultivar.

[0816] J8. The kit of any one of embodiments J1 to J8, wherein if more than one polynucleotide primer pair is present, each polynucleotide primer pair binds to different unique subsequences of the same terpene synthase paralog, to different unique subsequences of different terpene synthase paralogs, or to different unique subsequences of the same terpene synthase paralog and to different unique subsequences of different terpene synthase paralogs.

[0817] J9. The kit of any one of embodiments J1 to J8, further comprising reagents for amplification of nucleic acid from a plant cultivar.

[0818] J10. The kit of any one of embodiments J1 to J9, wherein the unique subsequence of at least one terpene synthase paralog is outside the sequence encoding the active site of the terpene synthase paralog.

[0819] K1. A method of preparing primers for uniquely amplifying a gene or a paralog thereof, comprising:
[0820] (c) identifying, within at least one exon of the gene or paralog thereof, a first sequence and a second sequence that are conserved for that gene or paralog thereof, wherein the first conserved sequence and the second conserved sequence flank a sequence that is not conserved; and
[0821] (d) preparing a pair of primers, wherein:
   [0822] (iv) one primer hybridizes to the first conserved sequence and one primer hybridizes to the second conserved sequence;
   [0823] (v) each primer, when hybridized to a sequence of the gene or paralog thereof that is not its target conserved sequence, has at least 5 mismatches with the sequence; and
   [0824] (vi) each primer, when hybridized to a sequence of the gene or paralog thereof that is not its target conserved sequence, has at least 3 mismatches with the sequence within 5 bases from the 3′-end of the primer.

[0825] K2. The method of embodiment K1, wherein the size of the product that is amplified by the prepared pair of primers is 300 base pairs or less.

[0826] K3. The method of embodiment K1 or K2, wherein the size of the product that is amplified by the prepared pair of primers is 292 base pairs or less.

[0827] K4. The method of any one of embodiments K1 to K3, wherein the size of the product that is amplified by the prepared pair of primers is between about 40 base pairs to about 200 base pairs.

[0828] K5. The method of any one of embodiments K1 to K4, wherein the size of the product that is amplified by the prepared pair of primers is between about 50 base pairs to about 150 base pairs.

[0829] K6. The method of any one of embodiments K1 to K5, wherein the melting temperature of each primer hybridized to its target conserved sequence is between about 57° C. to about 63° C.

[0830] K7. The method of any one of embodiments K1 to K6, wherein the difference between the melting temperatures of each primer of the primer pair hybridized to its target sequence is 3° C. or less.

[0831] K8. The method of any one of embodiments K1 to K7, wherein, for at least one exon of the gene or paralog thereof, more than one primer pair is prepared, wherein each primer pair amplifies a difference sequence within the exon of the gene or paralog thereof.

[0832] K9. The method of any one of embodiments K1 to K8, wherein more than one primer pair is prepared and at least two primer pairs amplify sequences within two different exons of the gene or paralog thereof.

[0833] K10. The method of any one of embodiments K1 to K9, wherein the gene or paralog thereof is of a terpene synthase gene.

[0834] L1. A genetically modified plant cultivar produced by the method of any one of embodiments A39 to A48 and C1 to C12.

[0835] L2. The genetically modified plant cultivar of embodiment L1, wherein the plant cultivar is a Cannabis cultivar.

[0836] M1. A method of identifying whether a plant cultivar comprises a terpene synthase gene or a paralog thereof that has been genetically modified, comprising:
[0837] (a) obtaining a nucleic acid sample from the plant cultivar;
[0838] (b) contacting the nucleic acid sample with the solid support of any one of embodiments E1 to E11 or the collection of any one of embodiments F1 to F12, thereby preparing a mixture, wherein at least one single-stranded polynucleotide species of the solid support or the collection can specifically bind to at least one genetically modified unique subsequence of a terpene synthase gene or a paralog thereof in the nucleic acid sample, when the at least one genetically modified unique subsequence is present, wherein the at least one genetically modified unique subsequence of the terpene synthase gene or a paralog thereof is different than the other subsequences of the terpene synthase gene or paralog thereof and the unique subsequence of the terpene synthase gene is different than the subsequences of other terpene synthase genes and/or paralogs thereof; and
[0839] (c) subjecting the mixture to conditions that facilitate specific binding of the at least one single-stranded polynucleotide species of the solid support or the collection to its corresponding at least one genetically modified unique subsequence of a terpene synthase gene or paralog thereof in the nucleic acid sample, when the at least one genetically modified unique subsequence is present in the nucleic acid sample; and
[0840] (d) detecting at least one single-stranded polynucleotide species of the solid support or the collection as being specifically bound to its corresponding genetically modified unique subsequence of a terpene synthase gene or paralog thereof in the nucleic acid sample wherein, if the at least one genetically modified unique subsequence is detected as specifically bound to a solid support or a collection in (c), the plant cultivar is identified as comprising a genetically modified terpene synthase or paralog thereof.

[0841] M2. The method of embodiment M1, wherein the detecting is by a signal that is generated when a single-stranded polynucleotide species of the collection binds to its corresponding genetically modified unique subsequence.

[0842] M3. The method of embodiment M2, wherein the signal is an electrical signal, an electronic signal, from an optical label or from a radiolabel.

[0843] M4. The method of any one of embodiments M1 to M3 further comprising, if the plant cultivar is identified as comprising a genetically modified terpene synthase or paralog thereof, determining the type of genetic modification.

[0844] M5. The method of embodiment M4, wherein the type of genetic modification is selected from among deletions, insertions and substitutions.

[0845] M6. The method of embodiment M5, wherein the genetic modification comprises at least one substitution.

[0846] M7. The method of embodiment M6, wherein the at least one substitution is in a unique subsequence that expresses the active site of the terpene synthase, or a portion thereof.

[0847] M8. The method of any one of embodiments M1 to M7, wherein the plant cultivar is of embodiment L1 or L2.

[0848] M9. The method of any one of embodiments M1 to M8, wherein the plant cultivar is a Cannabis cultivar.

[0849] M10. The method of any one of embodiments M1 to M9, wherein the at least one genetically modified unique subsequence comprises an exon.

[0850] N1. A method of breeding one or more plant cultivars, comprising:
[0851] (i) obtaining one or more plant cultivars or samples therefrom;
[0852] (ii) preparing or analyzing nucleic acid from the one or more plant cultivars according to the method of any one of embodiments A1 to A50, D1-D2 and G1-G47;
[0853] (iii) based on (ii), identifying one or more plant cultivars as desirable for breeding or as not desirable for breeding; and
[0854] (iv) if one or more plant cultivars are identified as desirable for breeding in (iii), breeding all or a subset of the one or more plant cultivars so identified.

[0855] N1.1. A method of producing offspring from one or more plant cultivars, comprising:
[0856] (i) obtaining one or more plant cultivars or samples therefrom;
[0857] (ii) analyzing nucleic acid from the one or more plant cultivars according to the method of any one of embodiments A1 to A50, D1-D2 and G1-G47;
[0858] (iii) based on (ii), identifying one or more plant cultivars as desirable for breeding or as not desirable for breeding; and
[0859] (iv) if one or more plant cultivars are identified as desirable for breeding in (iii), breeding all or a subset of the one or more plant cultivars so identified, thereby producing offspring of the one or more plant cultivars so identified.

[0860] N2. The method of embodiment N1 or N1.1, wherein the breeding characteristic identified in (iii) is resistance to an organism or situation or favoring an organism or situation.

[0861] N3. The method of embodiment N2, wherein the organism or situation is selected from among insects, pests, mold, chemicals, mildew, fungi, bacteria, viruses, an environmental condition or a geographic location.

[0862] N4. The method of any one of embodiments N1 to N3, further comprising, in (iii), based on (ii), identifying the terpene abundance profile, the flavonoid profile, the cannabinoid profile, the heredity or a combination thereof of the one or more plant cultivars as desirable for breeding or as not desirable for breeding.

[0863] N4.1. The method of embodiment N3 or N4, wherein the plant cultivar is selected for resistance to an organism or situation that is identified based on identifying one or more terpene synthase genes, determining the expression profile of one or more terpene synthase genes, and/or determining the production profile of one or more terpenes.

[0864] N4.2. The method of any one of embodiments N3 to N4.1, wherein sets of between 1-50, 1-45, 1-40, 1-35, 1-30, 1-25, 1-20, 1-15, 1-10, 1-5, 1-4, 1-3, 2 or 1 TPS genes, or 1, 2, 3, 4, 5, 6, 7, 8, 9, 10, 11, 12, 13, 14, 15, 16, 17, 18, 19, 20, 21, 22, 23, 24, 25, 26, 27, 28, 29, 30, 31, 32, 33, 34, 35, 36, 37, 38, 39, 40, 41, 42, 43, 44, 45, 46, 47, 48, 49, 50, 51, 52, 53, 54, 55, 56, 57, 58, 59, 60 or more, up to 100 or more TPS genes are assigned as imparting resistance to an organism or situation to a plant cultivar.

[0865] N4.3. The method of any one of embodiments N3 to N4.2, wherein the one or more TPS genes, or sets thereof, produce one or more of the terpenes selected from among α-Bisabolol, endo-Borneol, Camphene, Camphor, 3-Carene, Caryophyllene, Caryophyllene Oxide, α-Cedrene, Cedrol, Citronellol, Eucalyptol (1,8 Cineole), α-Farnesene, β-Farnesene, Fenchol, Fenchone, Geraniol, Geranyl Acetate, Guaiol, Humulene, Isoborneol, Isopulegol, D-Limonene, Linalool, Menthol, β-Myrcene, Nerol, trans-Nerolidol, cis-Nerolidol, trans-Ocimene, cis-Ocimene, α-Phellandrene, Phytol 1, Phytol 2, α-Pinene, β-Pinene, Pulegone, Sabinene, Sabinene Hydrate, α-Terpinene, γ-Terpinene, α-Terpineol, Terpinolene, Valencene, γ-Elemene, Z-Ocimene, E-Ocimene, α-Thujone, Thujene, γ-Muurolene, 2-Norpinene, α-Santalene, α-Selinene, Germacrene D, Eudesma-3,7(11)-diene, δ-Cadinol, trans-α-Beramotene, trans-2-pinanol, p-cymen-8-ol, Sativene, Cyclosativene, α-guaiene, γ-gurjunene, α-bulnesene, Bulnesol, α-eudesmol, β-eudesmol, Hedycaryol, γ-eudesmol, Alloaromadendrene, p-cymene, α-Copaene, β-Elemene, α-Cubebene, Linalyl acetate, Bornyl acetate, Heptacosane, Tricosane, S-Limonene, (−)-Thujopsene, Hashenene 5,5-dimethyl-1-vinylbicyclo[2.1.1]hexane, (−)-englerin A and Artemisinin.

[0866] N4.4. The method of any one of embodiments N3 to N4.3 that is a method of breeding to produce one or more offspring cultivars that show increased anti-pathogenic properties compared to at least one of the parent cultivars.

[0867] N4.5. The method of embodiment N4.4, wherein the one or more offspring cultivars comprises a terpene synthase profile comprising one or more of increased amounts/expression of TPS13-like2JL, TPS13JL, TPS17JL, TPS30JL, TPS64JL, TPS6-likeJL, TPS6JL, TPS11-likeJL, TPS51JL, TPS30-likeJL, TPS3JL, TPS52JL, TPS5JL, TPS13-like1JL, TPS42JL, TPS1JL, TPS53JL, TPS12JL, TPS40JL, TPS63JL, TPS33JL, TPS61JL, TPS12-likeJL, TPS62JL, TPS2JL, TPS43JL, TPS11JL, TPS38JL, TPS36JL, TPS37JL.

[0868] N4.6. The method of any one of embodiments N3 to N4.5 that is a method of breeding to produce one or more offspring cultivars comprising one or more root specifically expressed terpene synthases that increase resistance against pests in the soil and/or one or more root specifically expressed terpene synthases that respond favorably to beneficial microorganisms in the soil, compared to at least one of the parent cultivars.

[0869] N4.7. The method of embodiment N4.6, wherein the one or more offspring cultivars comprises a terpene synthase profile comprising one or more of increased amounts/expression of TPS11JL, TPS49JL, TPS41JL, TPS12JL, TPS11-likeJL, TPS36JL, TPS6JL, TPS37JL and TPS64JL.

[0870] N4.8. The method of any one of embodiments N3 to N4.7 that is a method of breeding to produce one or more offspring cultivars comprising one or more stem specifically expressed terpene synthases that increase resistance against stem-hosted pests, compared to at least one of the parent cultivars.

[0871] N4.9. The method of embodiment N4.8, wherein the one or more offspring cultivars comprises a terpene synthase profile comprising one or more of increased amounts/expression of TPS63JL, TPS43JL, TPS41JL, TPS6-likeJL, TPS33JL and TPS24JL.

[0872] N4.10. The method of any one of embodiments N3 to N4.9 that is a method of breeding to produce one or more offspring cultivars comprising one or more herbicidal properties, compared to at least one of the parent cultivars.

[0873] N4.11. The method of embodiment N4.10, wherein the one or more offspring cultivars comprises a terpene profile comprising one or more of increased amounts of geraniol, pilegone, citronellol, borneol and para-cymene.

[0874] N4.12. The method of any one of embodiments N3 to N4.11 that is a method of breeding to produce one or more offspring cultivars comprising that comprise one or more pesticidal properties, compared to at least one of the parent cultivars.

[0875] N4.13. The method of embodiment N4.12, wherein the one or more offspring cultivars comprises a terpene profile comprising one or more of increased amounts of aromadendrene, α-bisabolol, cedrol, nerolidol, trans-nerolidol and guaiol.

[0876] N4.14. The method of embodiment N1 or N1.1, wherein the breeding characteristic identified in (iii) is affinity towards an organism or situation or favoring an organism or situation.

[0877] N4.15. The method of embodiment N4.14, wherein the plant cultivar is selected for having an affinity towards an organism or situation that is identified based on identifying and/or quantifying one or more terpene synthase genes and/or paralogs thereof, determining the expression profile of one or more terpene synthase genes and/or paralogs thereof, determining the production profile of one or more terpenes, determining the production profile of one or more cannabinoids, determining the production profile of one or more flavonoids or a combination thereof.

[0878] N4.16. The method of embodiment N4.14 or N4.15 that is a method of breeding to produce one or more offspring cultivars comprising one or more insect pheromonal properties, compared to at least one of the parent cultivars.

[0879] N4.17. The method of embodiment N4.16, wherein the one or more offspring cultivars comprises a terpene profile comprising one or more of increased amounts of endo-borneol, isoborneol, 3-carene, carveol, germacrene B, hedycaryol, menthol, cis-nerolidol, cis-β-ocimene, trans-β-ocimene, sabinene hydrate, α-terpinene, thymol, β-farnesene, α-farnesene, γ-eudesmol, alloaromadendrene, valencene and pulegone.

[0880] N4.18. The method of any one of embodiments N4.14 to N4.17, wherein the organism or situation is selected from among exposure to insects, pests, mold, chemicals, mildew, fungi, bacteria, an environmental condition or a geographic location.

[0881] N5. The method of any one of embodiments N1 to N4.18, further comprising, in (iii), based on (ii), identifying one or more therapeutic activities of the one or more plant cultivars as desirable for breeding or as not desirable for breeding.

[0882] N6. The method of embodiment N5, wherein the one or more therapeutic activities are selected from among antioxidant, anti-inflammatory, antibacterial, antiviral, anti-anxiety, antinociceptive, analgesic, antihypertensive, sedative, antidepressant, acetylcholine esterase inhibition (AChEI), neuro-protective and gastro-protective effects.

[0883] N7. The method of embodiment N5 or N6, wherein the plant cultivar is selected for a therapeutic activity that is assigned based on identifying one or more terpene synthase genes, determining the expression profile of one or more terpene synthase genes, and/or determining the production profile of one or more terpenes.

[0884] N7.1. The method of embodiment N7, wherein the therapeutic activity is to impart energy, mental clarity, appetite stimulation or appetite suppression.

[0885] N7.2. The method of embodiment N7 or embodiment N7.1, wherein sets of between 1-50, 1-45, 1-40, 1-35, 1-30, 1-25, 1-20, 1-15, 1-10, 1-5, 1-4, 1-3, 2 or 1 TPS genes, or 1, 2, 3, 4, 5, 6, 7, 8, 9, 10, 11, 12, 13, 14, 15, 16, 17, 18, 19, 20, 21, 22, 23, 24, 25, 26, 27, 28, 29, 30, 31, 32, 33, 34, 35, 36, 37, 38, 39, 40, 41, 42, 43, 44, 45, 46, 47, 48, 49, 50, 51, 52, 53, 54, 55, 56, 57, 58, 59, 60 or more, up to 100 or more TPS genes are assigned as imparting one or more therapeutic activities to a plant cultivar.

[0886] N7.3. The method of any one of embodiments N7 to N7.2, wherein the one or more TPS genes, or sets thereof, produce one or more of the terpenes selected from among α-Bisabolol, endo-Borneol, Camphene, Camphor, 3-Carene, Caryophyllene, Caryophyllene Oxide, α-Cedrene, Cedrol, Citronellol, Eucalyptol (1,8 Cineole), α-Farnesene, β-Farnesene, Fenchol, Fenchone, Geraniol, Geranyl Acetate, Guaiol, Humulene, Isoborneol, Isopulegol, D-Limonene, Linalool, Menthol, β-Myrcene, Nerol, trans-Nerolidol, cis-Nerolidol, trans-Ocimene, cis-Ocimene, α-Phellandrene, Phytol 1, Phytol 2, α-Pinene, β-Pinene, Pulegone, Sabinene, Sabinene Hydrate, α-Terpinene, γ-Terpinene, α-Terpineol, Terpinolene, Valencene, γ-Elemene, Z-Ocimene, E-Ocimene, α-Thujone, Thujene, γ-Muurolene, 2-Norpinene, α-Santalene, α-Selinene, Germacrene D, Eudesma-3,7(11)-diene, δ-Cadinol, trans-α-Beramotene, trans-2-pinanol, p-cymen-8-ol, Sativene, Cyclosativene, α-guaiene, γ-gurjunene, α-bulnesene, Bulnesol, α-eudesmol, β-eudesmol, Hedycaryol, γ-eudesmol, Alloaromadendrene, p-cymene, α-Copaene, β-Elemene, α-Cubebene, Linalyl acetate, Bornyl acetate, Heptacosane, Tricosane, S-Limonene, (−)-Thujopsene, Hashenene 5,5-dimethyl-1-vinylbicyclo[2.1.1]hexane, (−)-englerin A and Artemisinin.

[0887] N7.4. The method of any one of embodiments N1 to N7.4 that is a method of breeding to produce one or more offspring cultivars that show increased cannabinoid production compared to at least one of the parent cultivars.

[0888] N7.5. The method of embodiment N7.4, wherein the one or more offspring cultivars show reduced expression, or lack of expression, of one or more terpene synthases selected from among TPS13-like2JL, TPS13JL, TPS17JL, TPS30JL, TPS64JL, TPS6-likeJL, TPS6JL, TPS11-likeJL, TPS51JL, TPS30-likeJL, TPS3JL, TPS52JL, TPS5JL, TPS13-like1JL, TPS42JL, TPS1JL, TPS53JL, TPS12JL, TPS40JL, TPS63JL, TPS33JL, TPS61JL, TPS12-likeJL, TPS62JL, TPS2JL, TPS43JL, TPS11JL, TPS38JL, TPS36JL and TPS37JL compared to at least one of the parent cultivars.

[0889] N7.6. The method of any one of embodiments N1 to N7.6 that is a method of breeding to produce one or more offspring cultivars that produces an increased energetic effect compared to at least one of the parent cultivars.

[0890] N7.7. The method of embodiment N7.6, wherein the one or more offspring cultivars comprises a terpene profile comprising one or more of increased S-linalool production, increased terpinolene production, increased β-ocimene production, α-pinene production greater than β-pinene production, reduced or lack of R-linalool production, reduced or lack of α-terpineol production and reduced or lack of fenchol production compared to at least one of the parent cultivars.

[0891] N7.8. The method of any one of embodiments N1 to N7.7 that is a method of breeding to produce one or more offspring cultivars that produces an increased sedative effect compared to at least one of the parent cultivars.

[0892] N7.9. The method of embodiment N7.8, wherein the one or more offspring cultivars comprises a terpene profile comprising one or more of: about equal or equal amounts of β-pinene and α-pinene production, increased R-linalool production, increased limonene production, increased trans-nerolidol production, increased terpineol production, increased camphene production, reduced or lack of β-ocimene production, reduced or lack of S-linalool production and reduced or lack of terpinolene production compared to at least one of the parent cultivars.

[0893] N7.10. The method of any one of embodiments N1 to N7.9 that is a method of breeding to produce one or more offspring cultivars that produces an increased cognitive-enhancing effect compared to at least one of the parent cultivars.

[0894] N7.11. The method of embodiment N7.10, wherein the one or more offspring cultivars comprises a terpene profile comprising one or more of: greater amounts of β-pinene production relative to α-pinene production, increased β-ocimene production and increased eucalyptol production compared to at least one of the parent cultivars.

[0895] N7.12. The method of any one of embodiments N1 to N7.11 that is a method of breeding to produce one or more offspring cultivars that produces an increased appetite-suppressing effect compared to at least one of the parent cultivars.

[0896] N7.13. The method of embodiment N7.12, wherein the one or more offspring cultivars comprises a terpene profile comprising increased amounts of humulene production compared to at least one of the parent cultivars.

[0897] N7.14. The method of any one of embodiments N1 to N7.13 that is a method of breeding to produce one or more offspring cultivars that produces an increased anti-inflammatory effect compared to at least one of the parent cultivars.

[0898] N7.15. The method of embodiment N7.14, wherein the one or more offspring cultivars comprises a terpene profile comprising one or more of: increased α-pinene production, increased humulene production and increased β-caryophyllene production compared to at least one of the parent cultivars.

[0899] N7.16. The method of any one of embodiments N1 to N7.15 that is a method of breeding to produce one or more offspring cultivars that produces an increased anti-anxiety effect compared to at least one of the parent cultivars.

[0900] N7.17. The method of embodiment N7.16, wherein the one or more offspring cultivars comprises a terpene profile comprising one or more of: increased β-pinene production, increased humulene production, increased β-caryophyllene production, increased linalool production, increased nerolidol production and increased limonene production compared to at least one of the parent cultivars.

[0901] N7.18. The method of any one of embodiments N1 to N7.17 that is a method of breeding to produce one or more offspring cultivars that produces an increased antinociceptive effect compared to at least one of the parent cultivars.

[0902] N7.19. The method of embodiment N7.18, wherein the one or more offspring cultivars comprises a terpene profile comprising one or more of: increased α-bisabolol production, increased α-terpineol production, increased trans nerolidol production, increased α-phellandrene production, and increased eucalyptol production compared to at least one of the parent cultivars.

[0903] N7.20. The method of any one of embodiments N1 to N7.19 that is a method of breeding to produce one or more offspring cultivars that produces an increased body relaxing effect compared to at least one of the parent cultivars.

[0904] N7.21. The method of embodiment N7.20, wherein the one or more offspring cultivars comprises a terpene profile comprising one or more of: increased α-bisabolol production, increased α-terpineol production, increased trans nerolidol production and increased α-phellandrene production, compared to at least one of the parent cultivars.

[0905] N7.22. The method of any one of embodiments N1 to N7.21 that is a method of breeding to produce one or more offspring cultivars that produces an increased anti-depressant effect compared to at least one of the parent cultivars.

[0906] N7.23. The method of embodiment N7.22, wherein the one or more offspring cultivars comprises a terpene profile comprising one or more of: equal or about equal amounts of α-pinene and β-pinene production, increased limonene production, increased nerolidol production and increased linalool production, compared to at least one of the parent cultivars.

[0907] N7.24. The method of any one of embodiments N1 to N7.23 that is a method of breeding to produce one or more offspring cultivars that produces an increased amount of one or more acetyl cholinesterase-inhibitor (AChEI) terpenes compared to at least one of the parent cultivars.

[0908] N7.25. The method of embodiment N7.24, wherein the one or more offspring cultivars comprises a terpene profile comprising one or more of: increased amounts of α-pinene production, increased terpinolene production, increased β-ocimene production, increased 3-carene production, increased α and/or γ-terpinene production and increased sabinene production compared to at least one of the parent cultivars.

[0909] N7.26. The method of any one of embodiments N1 to N7.25 that is a method of breeding to produce one or more offspring cultivars that produces an increased anti-bacterial effect compared to at least one of the parent cultivars.

[0910] N7.27. The method of embodiment N7.26, wherein the one or more offspring cultivars comprises a terpene profile comprising one or more of: increased amounts of aromadendrene production, increased carvacrol production, increased β-caryophyllene production, increased eucalyptol production, increased fenchol production, increased germacrene D production, increased nerol production, increased pulegone production, increased sabinene production and increased geraniol production compared to at least one of the parent cultivars.

[0911] N7.28. The method of any one of embodiments N1 to N7.27 that is a method of breeding to produce one or more offspring cultivars that produces an increased anti-microbial effect compared to at least one of the parent cultivars.

[0912] N7.29. The method of embodiment N7.28, wherein the one or more offspring cultivars comprises a terpene profile comprising one or more of: increased amounts of camphor production, increased sabinene hydrate production and increased thymol production compared to at least one of the parent cultivars.

[0913] N7.30. The method of any one of embodiments N1 to N7.29 that is a method of breeding to produce one or more offspring cultivars that produces an increased fungicidal effect compared to at least one of the parent cultivars.

[0914] N7.31. The method of embodiment N7.30, wherein the one or more offspring cultivars comprises a terpene profile comprising one or more of: increased amounts of citronellol production, increased para-cymene production, increased pulegone production and increased geraniol production compared to at least one of the parent cultivars.

[0915] N7.32. The method of any one of embodiments N1 to N7.31 that is a method of breeding to produce one or more offspring cultivars that produces an increased expectorant effect compared to at least one of the parent cultivars.

[0916] N7.33. The method of embodiment N7.32, wherein the one or more offspring cultivars comprises a terpene profile comprising one or more of: increased amounts of camphene production, increased sabinene hydrate production and increased geraniol production compared to at least one of the parent cultivars.

[0917] N7.34. The method of any one of embodiments N1 to N7.33 that is a method of breeding to produce one or more offspring cultivars that produces an increased expectorant effect compared to at least one of the parent cultivars.

[0918] N7.35. The method of embodiment N7.34, wherein the one or more offspring cultivars comprises a terpene profile comprising one or more of: increased amounts of camphene production, increased sabinene hydrate production and increased geraniol production compared to at least one of the parent cultivars.

[0919] N7.36. The method of any one of embodiments N1 to N7.35 that is a method of breeding to produce one or more offspring cultivars that produces increased non-irritant properties compared to at least one of the parent cultivars.

[0920] N7.37. The method of embodiment N7.36, wherein the one or more offspring cultivars comprises a terpene profile comprising one or more of reduced or absent: borneol, α-cedrene, citronellol or para-cymene, or increased amounts of the counter-irritant fenchone.

[0921] N8. The method of any one of embodiments N1 to N7.37, wherein the one or more plant cultivars are Cannabis cultivars.

[0922] O1. A method of cultivating one or more plant cultivars as a crop, comprising:
[0923] (i) obtaining one or more plant cultivars or samples therefrom;
[0924] (ii) preparing or analyzing nucleic acid from the one or more plant cultivars according to the method of any one of embodiments A1 to A50, D1-D2 and G1-G47;
[0925] (iii) based on (ii), identifying one or more plant cultivars as desirable for cultivating as a crop or as not desirable for cultivating as a crop; and
[0926] (iv) if one or more plant cultivars are identified as desirable for cultivating as a crop in (iii), cultivating all or a subset of the one or more plant cultivars so identified.

[0927] O2. The method of embodiment O1, wherein the cultivating characteristic identified in (iii) is resistance to an organism or situation or favoring an organism or situation.

[0928] O3. The method of embodiment O2, wherein the organism or situation is selected from among insects, pests, mold, chemicals, mildew, fungi, bacteria, viruses, an environmental condition or a geographic location.

[0929] O4. The method of any one of embodiments O1 to O3, further comprising, in (iii), based on (ii), identifying the terpene abundance profile, the flavonoid profile, the cannabinoid profile, the heredity or a combination thereof of the one or more plant cultivars as desirable for cultivating or as not desirable for cultivating.

[0930] O5. The method of any one of embodiments O1 to O4, further comprising, in (iii), based on (ii), identifying one or more the therapeutic activities of the one or more plant cultivars as desirable for cultivating or as not desirable for cultivating.

[0931] O6. The method of embodiment N5, wherein the one or more therapeutic activities are selected from among antioxidant, anti-inflammatory, antibacterial, antiviral, anti-anxiety, antinociceptive, analgesic, antihypertensive, sedative, antidepressant, acetylcholine esterase inhibition (AChEI), neuro-protective and gastro-protective effects.

[0932] O7. The method of any one of embodiments O1 to O6, wherein the one or more plant cultivars are Cannabis cultivars.

[0933] P1. A method of treating a subject with one or more plant cultivars or a portion thereof or an extract thereof, comprising:
[0934] (i) obtaining one or more plant cultivars or samples therefrom;
[0935] (ii) preparing or analyzing nucleic acid from the one or more plant cultivars according to the method of any one of embodiments A1 to A50, D1-D2 and G1-G47;
[0936] (iii) based on (ii), identifying one or more plant cultivars as desirable for treating a subject or as not desirable for treating a subject; and
[0937] (iv) if one or more plant cultivars are identified as desirable for treating a subject in (iii), treating the subject with the one or more plant cultivars identified according to (iii), or with a portion thereof, or with an extract thereof.

[0938] P2. The method of embodiment P1, wherein the treatment characteristic identified in (iii) is antioxidant, anti-inflammatory, antibacterial, antiviral, anti-anxiety, antinociceptive, analgesic, antihypertensive, sedative, antidepressant, acetylcholine esterase inhibition (AChEI), neuro-protective or gastro-protective effects, or any combination thereof.

[0939] P3. The method of embodiment P1 or P2, wherein the one or more plant cultivars are Cannabis cultivars.

[0940] P4. The method of any one of embodiments P1 to P3, wherein the subject is a human or an animal.

[0941] P5. The method of any one of embodiments P1 to P4, wherein the portion thereof is a seed, flower, stem or leaf of the one or more plant cultivars.

[0942] P6. The method of any one of embodiments P1 to P5, wherein the subject is treated with a portion or an extract of the one or more plant cultivars.

[0943] P7. The method of any one of embodiments P1 to P6, wherein the treatment is administered orally, topically, or through inhalation.

[0944] P8. The method of any one of embodiments P1 to P7, wherein the treatment is self-administered, or is administered by an entity other than the subject.

[0945] Q1. A method of breeding one or more plant cultivars, comprising:
[0946] (i) obtaining one or more plant cultivars or samples therefrom;
[0947] (ii) identifying whether the one or more plant cultivars comprise(s) a terpene synthase gene or a paralog thereof that has been genetically modified according to the method of any one of embodiments M1 to M10;
[0948] (iii) based on (ii), identifying one or more plant cultivars as desirable for breeding or as not desirable for breeding; and
[0949] (iv) if one or more plant cultivars are identified as desirable for breeding in (iii), breeding all or a subset of the one or more plant cultivars so identified.

[0950] Q2. The method of embodiment Q1, wherein the breeding characteristic identified in (iii) is resistance to an organism or situation or favoring an organism or situation.

[0951] Q3. The method of embodiment Q2, wherein the organism or situation is selected from among insects, pests, mold, chemicals, mildew, fungi, bacteria, viruses, an environmental condition or a geographic location.

[0952] Q4. The method of any one of embodiments Q1 to Q3, further comprising, in (iii), based on (ii), identifying the terpene abundance profile, the flavonoid profile, the cannabinoid profile, the heredity or a combination thereof of the one or more plant cultivars as desirable for breeding or as not desirable for breeding.

[0953] Q5. The method of any one of embodiments Q1 to Q4, further comprising, in (iii), based on (ii), identifying one or more the therapeutic activities of the one or more plant cultivars as desirable for breeding or as not desirable for breeding.

[0954] Q6. The method of embodiment Q5, wherein the one or more therapeutic activities are selected from among antioxidant, anti-inflammatory, antibacterial, antiviral, anti-anxiety, antinociceptive, analgesic, antihypertensive, sedative, antidepressant, acetylcholine esterase inhibition (AChEI), neuro-protective and gastro-protective effects.

[0955] Q7. The method of any one of embodiments Q1 to Q6, wherein the one or more plant cultivars are Cannabis cultivars.

[0956] R1. A method of cultivating one or more plant cultivars as a crop, comprising:
[0957] (i) obtaining one or more plant cultivars or samples therefrom;
[0958] (ii) identifying whether the one or more plant cultivars comprise(s) a terpene synthase gene or a paralog thereof that has been genetically modified according to the method of any one of embodiments M1 to M10;
[0959] (iii) based on (ii), identifying one or more plant cultivars as desirable for cultivating as a crop or as not desirable for cultivating as a crop; and
[0960] (iv) if one or more plant cultivars are identified as desirable for cultivating as a crop in (iii), cultivating all or a subset of the one or more plant cultivars so identified.

[0961] R2. The method of embodiment R1, wherein the cultivating characteristic identified in (iii) is resistance to an organism or situation or favoring an organism or situation.

[0962] R3. The method of embodiment R2, wherein the organism or situation is selected from among insects, pests, mold, chemicals, mildew, fungi, bacteria, viruses, an environmental condition or a geographic location.

[0963] R4. The method of any one of embodiments R1 to R3, further comprising, in (iii), based on (ii), identifying the terpene abundance profile, the flavonoid profile, the cannabinoid profile, the heredity or a combination thereof of the one or more plant cultivars as desirable for cultivating or as not desirable for cultivating.

[0964] R5. The method of any one of embodiments R1 to R4, further comprising, in (iii), based on (ii), identifying one or more the therapeutic activities of the one or more plant cultivars as desirable for cultivating or as not desirable for cultivating.

[0965] R6. The method of embodiment R5, wherein the one or more therapeutic activities are selected from among antioxidant, anti-inflammatory, antibacterial, antiviral, anti-anxiety, antinociceptive, analgesic, antihypertensive, sedative, antidepressant, acetylcholine esterase inhibition (AChEI), neuro-protective and gastro-protective effects.

[0966] R7. The method of any one of embodiments R1 to R6, wherein the one or more plant cultivars are Cannabis cultivars.

[0967] S1. A method of treating a subject with one or more plant cultivars or a portion thereof or an extract thereof, comprising:
[0968] (i) obtaining one or more plant cultivars or samples therefrom;
[0969] (ii) identifying whether the one or more plant cultivars comprise(s) a terpene synthase gene or a paralog thereof that has been genetically modified according to the method of any one of embodiments M1 to M10;
[0970] (iii) based on (ii), identifying one or more plant cultivars as desirable for treating a subject or as not desirable for treating a subject; and
[0971] (iv) if one or more plant cultivars are identified as desirable for treating a subject in (iii), treating the subject with the one or more plant cultivars identified according to (iii), or with a portion thereof, or with an extract thereof.

[0972] S2. The method of embodiment S1, wherein the treatment characteristic identified in (iii) is antioxidant, anti-inflammatory, antibacterial, antiviral, anti-anxiety, antinociceptive, analgesic, antihypertensive, sedative, antidepressant, acetylcholine esterase inhibition (AChEI), neuro-protective or gastro-protective effects, or any combination thereof.

[0973] S3. The method of embodiment S1 or S2, wherein the one or more plant cultivars are Cannabis cultivars.

[0974] S4. The method of any one of embodiments S1 to S3, wherein the subject is a human or an animal.

[0975] S5. The method of any one of embodiments S1 to S4, wherein the portion thereof is a seed, flower, stem or leaf of the one or more plant cultivars.

[0976] S6. The method of any one of embodiments S1 to S5, wherein the subject is treated with a portion or an extract of the one or more plant cultivars.

[0977] S7. The method of any one of embodiments S1 to S6, wherein the treatment is administered orally, topically, or through inhalation.

[0978] S8. The method of any one of embodiments S1 to S7, wherein the treatment is self-administered, or is administered by an entity other than the subject.

[0979] The entirety of each patent, patent application, publication and document referenced herein hereby is incorporated by reference. Citation of the above patents, patent applications, publications and documents is not an admission that any of the foregoing is pertinent prior art, nor does it constitute any admission as to the contents or date of these publications or documents. Their citation is not an indication of a search for relevant disclosures. All statements regarding the date(s) or contents of the documents is based on available information and is not an admission as to their accuracy or correctness.

[0980] Modifications can be made to the foregoing without departing from the basic aspects of the technology. Although the technology has been described in substantial detail with reference to one or more specific embodiments, those of ordinary skill in the art will recognize that changes may be made to the embodiments specifically disclosed in this application, yet these modifications and improvements are within the scope and spirit of the technology.

[0981] The technology illustratively described herein suitably may be practiced in the absence of any element(s) not specifically disclosed herein. Thus, for example, in each instance herein any of the terms “comprising,” “consisting essentially of,” and “consisting of” may be replaced with either of the other two terms. The terms and expressions which have been employed are used as terms of description and not of limitation and use of such terms and expressions do not exclude any equivalents of the features shown and described or portions thereof, and various modifications are possible within the scope of the technology claimed. The term “a” or “an” can refer to one of or a plurality of the elements it modifies (e.g., “a reagent” can mean one or more reagents) unless it is contextually clear either one of the elements or more than one of the elements is described. The term “about” as used herein refers to a value within 10% of the underlying parameter (i.e., plus or minus 10%), and use of the term “about” at the beginning of a string of values modifies each of the values (i.e., “about 1, 2 and 3” refers to about 1, about 2 and about 3). For example, a weight of “about 100 grams” can include weights between 90 grams and 110 grams. Further, when a listing of values is described herein (e.g., about 50%, 60%, 70%, 80%, 85% or 86%) the listing includes all intermediate and fractional values thereof (e.g., 54%, 85.4%). Thus, it should be understood that although the present technology has been specifically disclosed by representative embodiments and optional features, modification and variation of the concepts herein disclosed may be resorted to by those skilled in the art, and such modifications and variations are considered within the scope of this technology.

[0982] Certain embodiments of the technology are set forth in the claim(s) that follow(s).

The application's sequence listing, which the Patent Office published only in electronic form, follows.

SEQUENCE LISTING (1400 sequences)

SEQ ID NO: 1 - DNA, 23 bp, synthetic construct
  misc_feature 1..23: note = Description of Artificial Sequence: Synthetic primer
  source 1..23: mol_type = other DNA
atattcaaagatcaaccagcagc

SEQ ID NO: 2 - DNA, 22 bp, synthetic construct
  misc_feature 1..22: note = Description of Artificial Sequence: Synthetic primer
  source 1..22: mol_type = other DNA
tgtgggtttgtagttgcctgat

SEQ ID NO: 3 - DNA, 25 bp, synthetic construct
  misc_feature 1..25: note = Description of Artificial Sequence: Synthetic primer
  source 1..25: mol_type = other DNA
agctatgggaaaagaatcaatgagc

SEQ ID NO: 4 - DNA, 23 bp, synthetic construct
  misc_feature 1..23: note = Description of Artificial Sequence: Synthetic primer
  source 1..23: mol_type = other DNA
gagtttgaaatgaagagcagtgg

SEQ ID NO: 5 - DNA, 25 bp, synthetic construct
  misc_feature 1..25: note = Description of Artificial Sequence: Synthetic primer
  source 1..25: mol_type = other DNA
gaggctgaaaatcctttagttaagc

SEQ ID NO: 6 - DNA, 27 bp, synthetic construct
  misc_feature 1..27: note = Description of Artificial Sequence: Synthetic primer
  source 1..27: mol_type = other DNA
acaggactgaatccatattgtctaagg

SEQ ID NO: 7 - DNA, 25 bp, synthetic construct
  misc_feature 1..25: note = Description of Artificial Sequence: Synthetic primer
  source 1..25: mol_type = other DNA
agatgaagcaagagatttcacaacc

SEQ ID NO: 8 - DNA, 22 bp, synthetic construct
  misc_feature 1..22: note = Description of Artificial Sequence: Synthetic primer
  source 1..22: mol_type = other DNA
aatggagtggaagatccaaggc

SEQ ID NO: 9 - DNA, 21 bp, synthetic construct
  misc_feature 1..21: note = Description of Artificial Sequence: Synthetic primer
  source 1..21: mol_type = other DNA
atgccttggatcttccactcc

SEQ ID NO: 10 - DNA, 23 bp, synthetic construct
  misc_feature 1..23: note = Description of Artificial Sequence: Synthetic primer
  source 1..23: mol_type = other DNA
ctttttggtatgctgactgaacg

SEQ ID NO: 11 - DNA, 24 bp, synthetic construct
  misc_feature 1..24: note = Description of Artificial Sequence: Synthetic primer
  source 1..24: mol_type = other DNA
catttgctagagacagagtagtgg

SEQ ID NO: 12 - DNA, 22 bp, synthetic construct
  misc_feature 1..22: note = Description of Artificial Sequence: Synthetic primer
  source 1..22: mol_type = other DNA
gctgaagctcatctagtgtacc

SEQ ID NO: 13 - DNA, 20 bp, synthetic construct
  misc_feature 1..20: note = Description of Artificial Sequence: Synthetic primer
  source 1..20: mol_type = other DNA
tgaactggatcagctacccg

SEQ ID NO: 14 - DNA, 24 bp, synthetic construct
  misc_feature 1..24: note = Description of Artificial Sequence: Synthetic primer
  source 1..24: mol_type = other DNA
gtgtgaatcccattttctttgagg

SEQ ID NO: 15 - DNA, 22 bp, synthetic construct
  misc_feature 1..22: note = Description of Artificial Sequence: Synthetic primer
  source 1..22: mol_type = other DNA
gttgggtgatctgtgtaaatgc

SEQ ID NO: 16 - DNA, 22 bp, synthetic construct
  misc_feature 1..22: note = Description of Artificial Sequence: Synthetic primer
  source 1..22: mol_type = other DNA
ctgagacacgtaaaatggttgg

SEQ ID NO: 17 - DNA, 20 bp, synthetic construct
  misc_feature 1..20: note = Description of Artificial Sequence: Synthetic primer
  source 1..20: mol_type = other DNA
tgctacatgcgtgaaaaggg

SEQ ID NO: 18 - DNA, 22 bp, synthetic construct
  misc_feature 1..22: note = Description of Artificial Sequence: Synthetic primer
  source 1..22: mol_type = other DNA
tgtggtacatctccattgctcc

SEQ ID NO: 19 - DNA, 22 bp, synthetic construct
  misc_feature 1..22: note = Description of Artificial Sequence: Synthetic primer
  source 1..22: mol_type = other DNA
atgtgctgtggtcaatagttct

SEQ ID NO: 20 - DNA, 21 bp, synthetic construct
  misc_feature 1..21: note = Description of Artificial Sequence: Synthetic primer
  source 1..21: mol_type = other DNA
aaagaccaaatggagggctca

SEQ ID NO: 21 - DNA, 22 bp, synthetic construct
  misc_feature 1..22: note = Description of Artificial Sequence: Synthetic primer
  source 1..22: mol_type = other DNA
acaggtcgagtcaaagaattgg

SEQ ID NO: 22 - DNA, 20 bp, synthetic construct
  misc_feature 1..20: note = Description of Artificial Sequence: Synthetic primer
  source 1..20: mol_type = other DNA
gccatgttgacgtagaagcc

SEQ ID NO: 23 - DNA, 26 bp, synthetic construct
  misc_feature 1..26: note = Description of Artificial Sequence: Synthetic primer
  source 1..26: mol_type = other DNA
aggaagagataggaaaaatcaaagcg

SEQ ID NO: 24 - DNA, 20 bp, synthetic construct
  misc_feature 1..20: note = Description of Artificial Sequence: Synthetic primer
  source 1..20: mol_type = other DNA
gcgtcgatgaaccacttagc

SEQ ID NO: 25 - DNA, 27 bp, synthetic construct
  misc_feature 1..27: note = Description of Artificial Sequence: Synthetic primer
  source 1..27: mol_type = other DNA
taaggaagagataggaaaaatcaaagc

SEQ ID NO: 26 - DNA, 22 bp, synthetic construct
  misc_feature 1..22: note = Description of Artificial Sequence: Synthetic primer
  source 1..22: mol_type = other DNA
ttgtagtcctccgatgaagtgg

SEQ ID NO: 27 - DNA, 22 bp, synthetic construct
  misc_feature 1..22: note = Description of Artificial Sequence: Synthetic primer
  source 1..22: mol_type = other DNA
tggaggcatactaaacttgggg

SEQ ID NO: 28 - DNA, 24 bp, synthetic construct
  misc_feature 1..24: note = Description of Artificial Sequence: Synthetic primer
  source 1..24: mol_type = other DNA
aagctctaattcatccaatgttcc

SEQ ID NO: 29 - DNA, 27 bp, synthetic construct
  misc_feature 1..27: note = Description of Artificial Sequence: Synthetic primer
  source 1..27: mol_type = other DNA
gatgggatatggaaatgataaatgagt

SEQ ID NO: 30 - DNA, 23 bp, synthetic construct
  misc_feature 1..23: note = Description of Artificial Sequence: Synthetic primer
  source 1..23: mol_type = other DNA
tgttgatggagatgtgttggtct

SEQ ID NO: 31 - DNA, 20 bp, synthetic construct
  misc_feature 1..20: note = Description of Artificial Sequence: Synthetic primer
  source 1..20: mol_type = other DNA
ggatttcagtgggagcaccg

SEQ ID NO: 32 - DNA, 22 bp, synthetic construct
  misc_feature 1..22: note = Description of Artificial Sequence: Synthetic primer
  source 1..22: mol_type = other DNA
gcactatgacgaattatggcgg

SEQ ID NO: 33 - DNA, 20 bp, synthetic construct
  misc_feature 1..20: note = Description of Artificial Sequence: Synthetic primer
  source 1..20: mol_type = other DNA
tgaaaagaggtgatgctccg

SEQ ID NO: 34 - DNA, 24 bp, synthetic construct
  misc_feature 1..24: note = Description of Artificial Sequence: Synthetic primer
  source 1..24: mol_type = other DNA
ccatgctgatacatgaaaaatccc

SEQ ID NO: 35 - DNA, 29 bp, synthetic construct
  misc_feature 1..29: note = Description of Artificial Sequence: Synthetic primer
  source 1..29: mol_type = other DNA
atccttaatactacaaaattagcaagagc

SEQ ID NO: 36 - DNA, 27 bp, synthetic construct
  misc_feature 1..27: note = Description of Artificial Sequence: Synthetic primer
  source 1..27: mol_type = other DNA
aatgtaatcaaaagaccaaatgggagg

SEQ ID NO: 37 - DNA, 23 bp, synthetic construct
  misc_feature 1..23: note = Description of Artificial Sequence: Synthetic primer
  source 1..23: mol_type = other DNA
agtagattgaatgagctagaggc

SEQ ID NO: 38 - DNA, 18 bp, synthetic construct
  misc_feature 1..18: note = Description of Artificial Sequence: Synthetic primer
  source 1..18: mol_type = other DNA
aattcgagagctgtggcg

SEQ ID NO: 39 - DNA, 22 bp, synthetic construct
  misc_feature 1..22: note = Description of Artificial Sequence: Synthetic primer
  source 1..22: mol_type = other DNA
aagcaagttcaaggcaagaacg

SEQ ID NO: 40 - DNA, 22 bp, synthetic construct
  misc_feature 1..22: note = Description of Artificial Sequence: Synthetic primer
  source 1..22: mol_type = other DNA
gatggtttgtttcgctccatcg

SEQ ID NO: 41 - DNA, 23 bp, synthetic construct
  misc_feature 1..23: note = Description of Artificial Sequence: Synthetic primer
  source 1..23: mol_type = other DNA
ggagtgtttcttatggactgtgg

SEQ ID NO: 42 - DNA, 27 bp, synthetic construct
  misc_feature 1..27: note = Description of Artificial Sequence: Synthetic primer
  source 1..27: mol_type = other DNA
gaaaagctctaattcctccaatgttcc

SEQ ID NO: 43 - DNA, 24 bp, synthetic construct
  misc_feature 1..24: note = Description of Artificial Sequence: Synthetic primer
  source 1..24: mol_type = other DNA
tgtgaaagcaatggatgatttacc

SEQ ID NO: 44 - DNA, 23 bp, synthetic construct
  misc_feature 1..23: note = Description of Artificial Sequence: Synthetic primer
  source 1..23: mol_type = other DNA
aattttggtgtcctaacacatcg

SEQ ID NO: 45 - DNA, 25 bp, synthetic construct
  misc_feature 1..25: note = Description of Artificial Sequence: Synthetic primer
  source 1..25: mol_type = other DNA
tctgtaaacatcaattacaagaggc

SEQ ID NO: 46 - DNA, 21 bp, synthetic construct
  misc_feature 1..21: note = Description of Artificial Sequence: Synthetic primer
  source 1..21: mol_type = other DNA
tcggtcctgataccgaaatcc

SEQ ID NO: 47 - DNA, 22 bp, synthetic construct
  misc_feature 1..22: note = Description of Artificial Sequence: Synthetic primer
  source 1..22: mol_type = other DNA
atggatttcggtatcaggaccg

SEQ ID NO: 48 - DNA, 24 bp, synthetic construct
  misc_feature 1..24: note = Description of Artificial Sequence: Synthetic primer
  source 1..24: mol_type = other DNA
catctgtaagtcgtagaatcatgg

SEQ ID NO: 49 - DNA, 27 bp, synthetic construct
  misc_feature 1..27: note = Description of Artificial Sequence: Synthetic primer
  source 1..27: mol_type = other DNA
taatgaagatgaaaatatggactctcc

SEQ ID NO: 50 - DNA, 26 bp, synthetic construct
  misc_feature 1..26: note = Description of Artificial Sequence: Synthetic primer
  source 1..26: mol_type = other DNA
gataaactatcctgagaagcatgtcc

SEQ ID NO: 51 - DNA, 23 bp, synthetic construct
  misc_feature 1..23: note = Description of Artificial Sequence: Synthetic primer
  source 1..23: mol_type = other DNA
tgtccactcaaatcttagcatca

SEQ ID NO: 52 - DNA, 24 bp, synthetic construct
  misc_feature 1..24: note = Description of Artificial Sequence: Synthetic primer
  source 1..24: mol_type = other DNA
tgaaatgtttttgtaggacgaaca

SEQ ID NO: 53 - DNA, 24 bp, synthetic construct
  misc_feature 1..24: note = Description of Artificial Sequence: Synthetic primer
  source 1..24: mol_type = other DNA
caacccaaataaaattgttcgtcc

SEQ ID NO: 54 - DNA, 27 bp, synthetic construct
  misc_feature 1..27: note = Description of Artificial Sequence: Synthetic primer
  source 1..27: mol_type = other DNA
ttgtgaaatgttgtaatgtaagaatcg

SEQ ID NO: 55 - DNA, 22 bp, synthetic construct
  misc_feature 1..22: note = Description of Artificial Sequence: Synthetic primer
  source 1..22: mol_type = other DNA
tgtcaacaacaaaaggttgagg

SEQ ID NO: 56 - DNA, 24 bp, synthetic construct
  misc_feature 1..24: note = Description of Artificial Sequence: Synthetic primer
  source 1..24: mol_type = other DNA
agtctaaaccgtaaagaaacatgg

SEQ ID NO: 57 - DNA, 26 bp, synthetic construct
  misc_feature 1..26: note = Description of Artificial Sequence: Synthetic primer
  source 1..26: mol_type = other DNA
aaaggttgaggaattaaaggaagtgg

SEQ ID NO: 58 - DNA, 26 bp, synthetic construct
  misc_feature 1..26: note = Description of Artificial Sequence: Synthetic primer
  source 1..26: mol_type = other DNA
tcaaaatgataagacaatcccaaacg

SEQ ID NO: 59 - DNA, 25 bp, synthetic construct
  misc_feature 1..25: note = Description of Artificial Sequence: Synthetic primer
  source 1..25: mol_type = other DNA
tgaaaaattcaaagacgaggatggg

SEQ ID NO: 60 - DNA, 20 bp, synthetic construct
  misc_feature 1..20: note = Description of Artificial Sequence: Synthetic primer
  source 1..20: mol_type = other DNA
aagggcctctctagggctcg

SEQ ID NO: 61 - DNA, 21 bp, synthetic construct
  misc_feature 1..21: note = Description of Artificial Sequence: Synthetic primer
  source 1..21: mol_type = other DNA
acacttaaccgagtttttggc

SEQ ID NO: 62 - DNA, 20 bp, synthetic construct
  misc_feature 1..20: note = Description of Artificial Sequence: Synthetic primer
  source 1..20: mol_type = other DNA
tgctgacttcacaaagctcc

SEQ ID NO: 63 - DNA, 23 bp, synthetic construct
  misc_feature 1..23: note = Description of Artificial Sequence: Synthetic primer
  source 1..23: mol_type = other DNA
tgcaagagataggattgtggaat

SEQ ID NO: 64 - DNA, 26 bp, synthetic construct
  misc_feature 1..26: note = Description of Artificial Sequence: Synthetic primer
  source 1..26: mol_type = other DNA
gcatgagttaggatctcaagttcttc

SEQ ID NO: 65 - DNA, 27 bp, synthetic construct
  misc_feature 1..27: note = Description of Artificial Sequence: Synthetic primer
  source 1..27: mol_type = other DNA
tgggatataaattgtgtggataaactg

SEQ ID NO: 66 - DNA, 26 bp, synthetic construct
  misc_feature 1..26: note = Description of Artificial Sequence: Synthetic primer
  source 1..26: mol_type = other DNA
gcacttgctcaaactcttcataacaa

SEQ ID NO: 67 - DNA, 23 bp, synthetic construct
  misc_feature 1..23: note = Description of Artificial Sequence: Synthetic primer
  source 1..23: mol_type = other DNA
tgtttgcatagaggactcatccc

SEQ ID NO: 68 - DNA, 23 bp, synthetic construct
  misc_feature 1..23: note = Description of Artificial Sequence: Synthetic primer
  source 1..23: mol_type = other DNA
agttttcattccaaccaaagagc

SEQ ID NO: 69 - DNA, 23 bp, synthetic construct
  misc_feature 1..23: note = Description of Artificial Sequence: Synthetic primer
  source 1..23: mol_type = other DNA
tttggatgaagctcgatgtttgc

SEQ ID NO: 70 - DNA, 27 bp, synthetic construct
  misc_feature 1..27: note = Description of Artificial Sequence: Synthetic primer
  source 1..27: mol_type = other DNA
agtaacagatgctctaataatctttcg

SEQ ID NO: 71 - DNA, 21 bp, synthetic construct
  misc_feature 1..21: note = Description of Artificial Sequence: Synthetic primer
  source 1..21: mol_type = other DNA
atgaggaacattcagcagtgg

SEQ ID NO: 72 - DNA, 24 bp, synthetic construct
  misc_feature 1..24: note = Description of Artificial Sequence: Synthetic primer
  source 1..24: mol_type = other DNA
agcacgaagtaatataggtgaagc

SEQ ID NO: 73 - DNA, 22 bp, synthetic construct
  misc_feature 1..22: note = Description of Artificial Sequence: Synthetic primer
  source 1..22: mol_type = other DNA
atggcgtttgtgaagaggaagc

SEQ ID NO: 74 - DNA, 24 bp, synthetic construct
  misc_feature 1..24: note = Description of Artificial Sequence: Synthetic primer
  source 1..24: mol_type = other DNA
aattggatgaataagcaaagcagc

SEQ ID NO: 75 - DNA, 28 bp, synthetic construct
  misc_feature 1..28: note = Description of Artificial Sequence: Synthetic primer
  source 1..28: mol_type = other DNA
tccttagttctacaaaattagcaagagc

SEQ ID NO: 76 - DNA, 24 bp, synthetic construct
  misc_feature 1..24: note = Description of Artificial Sequence: Synthetic primer
  source 1..24: mol_type = other DNA
gtaatcaaaagaccaaatgggagg

SEQ ID NO: 77 - DNA, 26 bp, synthetic construct
  misc_feature 1..26: note = Description of Artificial Sequence: Synthetic primer
  source 1..26: mol_type = other DNA
acaagtagattgaatgagctagaagc

SEQ ID NO: 78 - DNA, 24 bp, synthetic construct
  misc_feature 1..24: note = Description of Artificial Sequence: Synthetic primer
  source 1..24: mol_type = other DNA
tcataaccatgttgtcgtagaagc

SEQ ID NO: 79 - DNA, 22 bp, synthetic construct
  misc_feature 1..22: note = Description of Artificial Sequence: Synthetic primer
  source 1..22: mol_type = other DNA
gttcaaggcaagaaggagtagc

SEQ ID NO: 80 - DNA, 21 bp, synthetic construct
  misc_feature 1..21: note = Description of Artificial Sequence: Synthetic primer
  source 1..21: mol_type = other DNA
tttgctccatcgtcatcgtcg

SEQ ID NO: 81 - DNA, 20 bp, synthetic construct
  misc_feature 1..20: note = Description of Artificial Sequence: Synthetic primer
  source 1..20: mol_type = other DNA
attatgcagcgacgatgacg

SEQ ID NO: 82 - DNA, 26 bp, synthetic construct
  misc_feature 1..26: note = Description of Artificial Sequence: Synthetic primer
  source 1..26: mol_type = other DNA
ccttgcttctgatcttgttattctcc

SEQ ID NO: 83 - DNA, 24 bp, synthetic construct
  misc_feature 1..24: note = Description of Artificial Sequence: Synthetic primer
  source 1..24: mol_type = other DNA
tggagtgtttcttatggactgtgg

SEQ ID NO: 84 - DNA, 24 bp, synthetic construct
  misc_feature 1..24: note = Description of Artificial Sequence: Synthetic primer
  source 1..24: mol_type = other DNA
ctctcaacagcattagtgaaaagc

SEQ ID NO: 85 - DNA, 24 bp, synthetic construct
  misc_feature 1..24: note = Description of Artificial Sequence: Synthetic primer
  source 1..24: mol_type = other DNA
tgtgaaagcaatggatgatttacc

SEQ ID NO: 86 - DNA, 23 bp, synthetic construct
  misc_feature 1..23: note = Description of Artificial Sequence: Synthetic primer
  source 1..23: mol_type = other DNA
aattttggtctcctaacacatcg

SEQ ID NO: 87 - DNA, 21 bp, synthetic construct
  misc_feature 1..21: note = Description of Artificial Sequence: Synthetic primer
  source 1..21: mol_type = other DNA
ggcgaaatggtttcacagtgg

SEQ ID NO: 88 - DNA, 21 bp, synthetic construct
  misc_feature 1..21: note = Description of Artificial Sequence: Synthetic primer
  source 1..21: mol_type = other DNA
cgtagaatcatggatgcgtgg

SEQ ID NO: 89 - DNA, 30 bp, synthetic construct
  misc_feature 1..30: note = Description of Artificial Sequence: Synthetic primer
  source 1..30: mol_type = other DNA
aaataatgaagatgaaaatatggactctcc

SEQ ID NO: 90 - DNA, 26 bp, synthetic construct
  misc_feature 1..26: note = Description of Artificial Sequence: Synthetic primer
  source 1..26: mol_type = other DNA
gataaactatcctgagaagcatgtcc

SEQ ID NO: 91 - DNA, 23 bp, synthetic construct
  misc_feature 1..23: note = Description of Artificial Sequence: Synthetic primer
  source 1..23: mol_type = other DNA
aaactatcaaccttcactttggc

SEQ ID NO: 92 - DNA, 22 bp, synthetic construct
  misc_feature 1..22: note = Description of Artificial Sequence: Synthetic primer
  source 1..22: mol_type = other DNA
ttcctcttttgctctcttcacc

SEQ ID NO: 93 - DNA, 26 bp, synthetic construct
  misc_feature 1..26: note = Description of Artificial Sequence: Synthetic primer
  source 1..26: mol_type = other DNA
tgcaaagacttggaatctcttatcac

SEQ ID NO: 94 - DNA, 22 bp, synthetic construct
  misc_feature 1..22: note = Description of Artificial Sequence: Synthetic primer
  source 1..22: mol_type = other DNA
gagacaccggataaccatgttg

SEQ ID NO: 95 - DNA, 23 bp, synthetic construct
  misc_feature 1..23: note = Description of Artificial Sequence: Synthetic primer
  source 1..23: mol_type = other DNA
gaggcaattttatggtgtgtacc

SEQ ID NO: 96 - DNA, 26 bp, synthetic construct
  misc_feature 1..26: note = Description of Artificial Sequence: Synthetic primer
  source 1..26: mol_type = other DNA
tctttgttgtttctcttgtctcttcc

SEQ ID NO: 97 - DNA, 20 bp, synthetic construct
  misc_feature 1..20: note = Description of Artificial Sequence: Synthetic primer
  source 1..20: mol_type = other DNA
tgggaaagcactggtatggg

SEQ ID NO: 98 - DNA, 23 bp, synthetic construct
  misc_feature 1..23: note = Description of Artificial Sequence: Synthetic primer
  source 1..23: mol_type = other DNA
agctccaattcatctagtgtacc

SEQ ID NO: 99 - DNA, 21 bp, synthetic construct
  misc_feature 1..21: note = Description of Artificial Sequence: Synthetic primer
  source 1..21: mol_type = other DNA
gtgggaaagcactggtatggg

SEQ ID NO: 100 - DNA, 25 bp, synthetic construct
  misc_feature 1..25: note = Description of Artificial Sequence: Synthetic primer
  source 1..25: mol_type = other DNA
aatttttgtaatgtggctcaaatgc

SEQ ID NO: 101 - DNA, 24 bp, synthetic construct
  misc_feature 1..24: note = Description of Artificial Sequence: Synthetic primer
  source 1..24: mol_type = other DNA
tgggatattagtgctatggatggg

SEQ ID NO: 102 - DNA, 28 bp, synthetic construct
  misc_feature 1..28: note = Description of Artificial Sequence: Synthetic primer
  source 1..28: mol_type = other DNA
ttctgaaggaattttattatatggaggc

SEQ ID NO: 103 - DNA, 25 bp, synthetic construct
  misc_feature 1..25: note = Description of Artificial Sequence: Synthetic primer
  source 1..25: mol_type = other DNA
tagtgaatccaaacaaggaagatgc

SEQ ID NO: 104 - DNA, 25 bp, synthetic construct
  misc_feature 1..25: note = Description of Artificial Sequence: Synthetic primer
  source 1..25: mol_type = other DNA
tcatctgtaagacgtaaaatcatcg

SEQ ID NO: 105 - DNA, 23 bp, synthetic construct
  misc_feature 1..23: note = Description of Artificial Sequence: Synthetic primer
  source 1..23: mol_type = other DNA
gatggcgtgtttgaagaagaagc

SEQ ID NO: 106 - DNA, 26 bp, synthetic construct
  misc_feature 1..26: note = Description of Artificial Sequence: Synthetic primer
  source 1..26: mol_type = other DNA
tgatagtacatgatcttttgtttggc

SEQ ID NO: 107 - DNA, 26 bp, synthetic construct
  misc_feature 1..26: note = Description of Artificial Sequence: Synthetic primer
  source 1..26: mol_type = other DNA
ttctcgaagatcagcaaactatcaac

SEQ ID NO: 108 - DNA, 25 bp, synthetic construct
  misc_feature 1..25: note = Description of Artificial Sequence: Synthetic primer
  source 1..25: mol_type = other DNA
ttgaaaggggtagaaagtgattgta

SEQ ID NO: 109 - DNA, 25 bp, synthetic construct
  misc_feature 1..25: note = Description of Artificial Sequence: Synthetic primer
  source 1..25: mol_type = other DNA
aggtaagagtaatggtgaagagagc

SEQ ID NO: 110 - DNA, 25 bp, synthetic construct
  misc_feature 1..25: note = Description of Artificial Sequence: Synthetic primer
  source 1..25: mol_type = other DNA
cattctcaaagtggtaagagattcc

SEQ ID NO: 111 - DNA, 22 bp, synthetic construct
  misc_feature 1..22: note = Description of Artificial Sequence: Synthetic primer
  source 1..22: mol_type = other DNA
gagcaaaagaggaggagaagcc

SEQ ID NO: 112 - DNA, 26 bp, synthetic construct
  misc_feature 1..26: note = Description of Artificial Sequence: Synthetic primer
  source 1..26: mol_type = other DNA
ggcatagacatttttgttggtgttgc

SEQ ID NO: 113 - DNA, 23 bp, synthetic construct
  misc_feature 1..23: note = Description of Artificial Sequence: Synthetic primer
  source 1..23: mol_type = other DNA
gaggcaattttatggtgtcttcc

SEQ ID NO: 114 - DNA, 22 bp, synthetic construct
  misc_feature 1..22: note = Description of Artificial Sequence: Synthetic primer
  source 1..22: mol_type = other DNA
tgttgtgtgtcttgtctcttcc

SEQ ID NO: 115 - DNA, 20 bp, synthetic construct
  misc_feature 1..20: note = Description of Artificial Sequence: Synthetic primer
  source 1..20: mol_type = other DNA
tgggaaagcactgatatggg

SEQ ID NO: 116 - DNA, 23 bp, synthetic construct
  misc_feature 1..23: note = Description of Artificial Sequence: Synthetic primer
  source 1..23: mol_type = other DNA
agctccaattcatctagtgtacc

SEQ ID NO: 117 - DNA, 24 bp, synthetic construct
  misc_feature 1..24: note = Description of Artificial Sequence: Synthetic primer
  source 1..24: mol_type = other DNA
tgggatattagtgctatggatggg

SEQ ID NO: 118 - DNA, 28 bp, synthetic construct
  misc_feature 1..28: note = Description of Artificial Sequence: Synthetic primer
  source 1..28: mol_type = other DNA
ttctgaaggaattttattatatggaggc

SEQ ID NO: 119 - DNA, 26 bp, synthetic construct
  misc_feature 1..26: note = Description of Artificial Sequence: Synthetic primer
  source 1..26: mol_type = other DNA
agctttgaagagtacattgagaatgc

SEQ ID NO: 120 - DNA, 26 bp, synthetic construct
  misc_feature 1..26: note = Description of Artificial Sequence: Synthetic primer
  source 1..26: mol_type = other DNA
atcatctgtaagtcgtaaaatcatcg

SEQ ID NO: 121 - DNA, 22 bp, synthetic construct
  misc_feature 1..22: note = Description of Artificial Sequence: Synthetic primer
  source 1..22: mol_type = other DNA
ggcgatgttcccaaatcaatcc

SEQ ID NO: 122 - DNA, 23 bp, synthetic construct
  misc_feature 1..23: note = Description of Artificial Sequence: Synthetic primer
  source 1..23: mol_type = other DNA
aacattggagagtagtcatcacc

SEQ ID NO: 123 - DNA, 26 bp, synthetic construct
  misc_feature 1..26: note = Description of Artificial Sequence: Synthetic primer
  source 1..26: mol_type = other DNA
gatgatgatggtgatgactactctcc

SEQ ID NO: 124 - DNA, 26 bp, synthetic construct
  misc_feature 1..26: note = Description of Artificial Sequence: Synthetic primer
  source 1..26: mol_type = other DNA
gatagtacatgatcttttgtatggcg

SEQ ID NO: 125 - DNA, 22 bp, synthetic construct
  misc_feature 1..22: note = Description of Artificial Sequence: Synthetic primer
  source 1..22: mol_type = other DNA
gatcagcaaactatcaaccccc

SEQ ID NO: 126 - DNA, 23 bp, synthetic construct
  misc_feature 1..23: note = Description of Artificial Sequence: Synthetic primer
  source 1..23: mol_type = other DNA
tcaccatcactcttacttcttcc

SEQ ID NO: 127 - DNA, 26 bp, synthetic construct
  misc_feature 1..26: note = Description of Artificial Sequence: Synthetic primer
  source 1..26: mol_type = other DNA
acttggaatctcttatcactttgagg

SEQ ID NO: 128 - DNA, 28 bp, synthetic construct
  misc_feature 1..28: note = Description of Artificial Sequence: Synthetic primer
  source 1..28: mol_type = other DNA
agagaattggcatacacattattattgg

SEQ ID NO: 129 - DNA, 23 bp, synthetic construct
  misc_feature 1..23: note = Description of Artificial Sequence: Synthetic primer
  source 1..23: mol_type = other DNA
gaggcaattttatggtgtgtacc

SEQ ID NO: 130 - DNA, 25 bp, synthetic construct
  misc_feature 1..25: note = Description of Artificial Sequence: Synthetic primer
  source 1..25: mol_type = other DNA
tttctcttgtctcttccaaaatacc

SEQ ID NO: 131 - DNA, 22 bp, synthetic construct
  misc_feature 1..22: note = Description of Artificial Sequence: Synthetic primer
  source 1..22: mol_type = other DNA
tggtgggaaagcactgatatgg

SEQ ID NO: 132 - DNA, 22 bp, synthetic construct
  misc_feature 1..22: note = Description of Artificial Sequence: Synthetic primer
  source 1..22: mol_type = other DNA
aatgtggctcaaatgcaactcc

SEQ ID NO: 133 - DNA, 20 bp, synthetic construct
  misc_feature 1..20: note = Description of Artificial Sequence: Synthetic primer
  source 1..20: mol_type = other DNA
tgggaaagcactgatatggg

SEQ ID NO: 134 - DNA, 23 bp, synthetic construct
  misc_feature 1..23: note = Description of Artificial Sequence: Synthetic primer
  source 1..23: mol_type = other DNA
agctccaattcatctagtgtacc

SEQ ID NO: 135 - DNA, 24 bp, synthetic construct
  misc_feature 1..24: note = Description of Artificial Sequence: Synthetic primer
  source 1..24: mol_type = other DNA
tgggatattagtgctatggatggg

SEQ ID NO: 136 - DNA, 28 bp, synthetic construct
  misc_feature 1..28: note = Description of Artificial Sequence: Synthetic primer
  source 1..28: mol_type = other DNA
ttctgaaggaattttattatatggaggc

SEQ ID NO: 137 - DNA, 25 bp, synthetic construct
  misc_feature 1..25: note = Description of Artificial Sequence: Synthetic primer
  source 1..25: mol_type = other DNA
gctttgaagagtacattgagaatgc

SEQ ID NO: 138 - DNA, 25 bp, synthetic construct
  misc_feature 1..25: note = Description of Artificial Sequence: Synthetic primer
  source 1..25: mol_type = other DNA
cgatgaatgtcgtattatggtaggg

SEQ ID NO: 139 - DNA, 24 bp, synthetic construct
  misc_feature 1..24: note = Description of Artificial Sequence: Synthetic primer
  source 1..24: mol_type = other DNA
gtgaatccaaacaaggaaaatgcc

SEQ ID NO: 140 - DNA, 27 bp, synthetic construct
  misc_feature 1..27: note = Description of Artificial Sequence: Synthetic primer
  source 1..27: mol_type = other DNA
tgaagttcccatatcatctttaagtcg

SEQ ID NO: 141 - DNA, 24 bp, synthetic construct
  misc_feature 1..24: note = Description of Artificial Sequence: Synthetic primer
  source 1..24: mol_type = other DNA
tgaattgaaaagaggcgatgttcc

SEQ ID NO: 142 - DNA, 22 bp, synthetic construct
  misc_feature 1..22: note = Description of Artificial Sequence: Synthetic primer
  source 1..22: mol_type = other DNA
acattggagagtagtcatcacc

SEQ ID NO: 143 - DNA, 24 bp, synthetic construct
  misc_feature 1..24: note = Description of Artificial Sequence: Synthetic primer
  source 1..24: mol_type = other DNA
tggtatatctgaagaggaagctcg

SEQ ID NO: 144 - DNA, 25 bp, synthetic construct
  misc_feature 1..25: note = Description of Artificial Sequence: Synthetic primer
  source 1..25: mol_type = other DNA
agaacattggagagtagtcatcacc

SEQ ID NO: 145 - DNA, 22 bp, synthetic construct
  misc_feature 1..22: note = Description of Artificial Sequence: Synthetic primer
  source 1..22: mol_type = other DNA
gcatagcttttcaccaatttgc

SEQ ID NO: 146 - DNA, 21 bp, synthetic construct
  misc_feature 1..21: note = Description of Artificial Sequence: Synthetic primer
  source 1..21: mol_type = other DNA
gggagggatgatgatgaagca

SEQ ID NO: 147 - DNA, 23 bp, synthetic construct
  misc_feature 1..23: note = Description of Artificial Sequence: Synthetic primer
  source 1..23: mol_type = other DNA
caatgtactgtggtcgataaccc

SEQ ID NO: 148 - DNA, 25 bp, synthetic construct
  misc_feature 1..25: note = Description of Artificial Sequence: Synthetic primer
  source 1..25: mol_type = other DNA
gaacaaaatcaaaagaccaaatggg

SEQ ID NO: 149 - DNA, 24 bp, synthetic construct
  misc_feature 1..24: note = Description of Artificial Sequence: Synthetic primer
  source 1..24: mol_type = other DNA
tggagaaagatgtgaaaaggatgc

SEQ ID NO: 150 - DNA, 23 bp, synthetic construct
  misc_feature 1..23: note = Description of Artificial Sequence: Synthetic primer
  source 1..23: mol_type = other DNA
attggcgtagaagcctaaattgg

SEQ ID NO: 151 - DNA, 23 bp, synthetic construct
  misc_feature 1..23: note = Description of Artificial Sequence: Synthetic primer
  source 1..23: mol_type = other DNA
tcacaagacaggagagttcaagg

SEQ ID NO: 152 - DNA, 20 bp, synthetic construct
  misc_feature 1..20: note = Description of Artificial Sequence: Synthetic primer
  source 1..20: mol_type = other DNA
tgaagtggcatctccaaagc

SEQ ID NO: 153 - DNA, 23 bp, synthetic construct
  misc_feature 1..23: note = Description of Artificial Sequence: Synthetic primer
  source 1..23: mol_type = other DNA
tggtggaaggattctaaacttgg

SEQ ID NO: 154 - DNA, 25 bp, synthetic construct
  misc_feature 1..25: note = Description of Artificial Sequence: Synthetic primer
  source 1..25: mol_type = other DNA
ctccaatgttccataaatgtcatgc

SEQ ID NO: 155 - DNA, 23 bp, synthetic construct
  misc_feature 1..23: note = Description of Artificial Sequence: Synthetic primer
  source 1..23: mol_type = other DNA
gcaagttggagtaagatttgagc

SEQ ID NO: 156 - DNA, 25 bp, synthetic construct
  misc_feature 1..25: note = Description of Artificial Sequence: Synthetic primer
  source 1..25: mol_type = other DNA
attagtgaaaagttgtagttcctcc

SEQ ID NO: 157 - DNA, 25 bp, synthetic construct
  misc_feature 1..25: note = Description of Artificial Sequence: Synthetic primer
  source 1..25: mol_type = other DNA
aagaggcaaaatggttttatagtgg

SEQ ID NO: 158 - DNA, 24 bp, synthetic construct
  misc_feature 1..24: note = Description of Artificial Sequence: Synthetic primer
  source 1..24: mol_type = other DNA
ttggtaacaggatttgtaaaagcg

SEQ ID NO: 159 - DNA, 20 bp, synthetic construct
  misc_feature 1..20: note = Description of Artificial Sequence: Synthetic primer
  source 1..20: mol_type = other DNA
ggatggttgtctgtgggagg

SEQ ID NO: 160 - DNA, 21 bp, synthetic construct
  misc_feature 1..21: note = Description of Artificial Sequence: Synthetic primer
  source 1..21: mol_type = other DNA
tgcatggcgaactatgttagg

SEQ ID NO: 161 - DNA, 21 bp, synthetic construct
  misc_feature 1..21: note = Description of Artificial Sequence: Synthetic primer
  source 1..21: mol_type = other DNA
tgcaaaaatcttggtagagcg

SEQ ID NO: 162 - DNA, 25 bp, synthetic construct
  misc_feature 1..25: note = Description of Artificial Sequence: Synthetic primer
  source 1..25: mol_type = other DNA
tggggataggagtaataatcaaccc

SEQ ID NO: 163 - DNA, 29 bp, synthetic construct
  misc_feature 1..29: note = Description of Artificial Sequence: Synthetic primer
  source 1..29: mol_type = other DNA
atattcaagtcttagcttcatctcaatta

SEQ ID NO: 164 - DNA, 21 bp, synthetic construct
  misc_feature 1..21: note = Description of Artificial Sequence: Synthetic primer
  source 1..21: mol_type = other DNA
atcgccccaaatagaagggtg

SEQ ID NO: 165 - DNA, 28 bp, synthetic construct
  misc_feature 1..28: note = Description of Artificial Sequence: Synthetic primer
  source 1..28: mol_type = other DNA
tttgagagtgaaattgagaaattgttgg

SEQ ID NO: 166 - DNA, 30 bp, synthetic construct
  misc_feature 1..30: note = Description of Artificial Sequence: Synthetic primer
  source 1..30: mol_type = other DNA
taaatccatgttgtcttaataatctaaacc

SEQ ID NO: 167 - DNA, 23 bp, synthetic construct
  misc_feature 1..23: note = Description of Artificial Sequence: Synthetic primer
  source 1..23: mol_type = other DNA
ggtttgcttagcttgtatgaggc

SEQ ID NO: 168 - DNA, 25 bp, synthetic construct
  misc_feature 1..25: note = Description of Artificial Sequence: Synthetic primer
  source 1..25: mol_type = other DNA
gcctctctatggtctttcttagagg

SEQ ID NO: 169 - DNA, 23 bp, synthetic construct
  misc_feature 1..23: note = Description of Artificial Sequence: Synthetic primer
  source 1..23: mol_type = other DNA
tggtggaaagagcatgagtttgc

SEQ ID NO: 170 - DNA, 25 bp, synthetic construct
  misc_feature 1..25: note = Description of Artificial Sequence: Synthetic primer
  source 1..25: mol_type = other DNA
attgaggctaatgcaatgactttgg

SEQ ID NO: 171 - DNA, 21 bp, synthetic construct
  misc_feature 1..21: note = Description of Artificial Sequence: Synthetic primer
  source 1..21: mol_type = other DNA
agctcgatggttgagtgaagg

SEQ ID NO: 172 - DNA, 20 bp, synthetic construct
  misc_feature 1..20: note = Description of Artificial Sequence: Synthetic primer
  source 1..20: mol_type = other DNA
ctagcaaggagagtggaagc

SEQ ID NO: 173 - DNA, 24 bp, synthetic construct
  misc_feature 1..24: note = Description of Artificial Sequence: Synthetic primer
  source 1..24: mol_type = other DNA
tgagcaaaagagaaatcacatacc

SEQ ID NO: 174 - DNA, 20 bp, synthetic construct
  misc_feature 1..20: note = Description of Artificial Sequence: Synthetic primer
  source 1..20: mol_type = other DNA
tttctttccagtgggtgtcc

SEQ ID NO: 175 - DNA, 24 bp, synthetic construct
  misc_feature 1..24: note = Description of Artificial Sequence: Synthetic primer
  source 1..24: mol_type = other DNA
tgaaacaatatggggtatcagagg

SEQ ID NO: 176 - DNA, 24 bp, synthetic construct
  misc_feature 1..24: note = Description of Artificial Sequence: Synthetic primer
  source 1..24: mol_type = other DNA
aatgctttctttgagcacttttcc

SEQ ID NO: 177 - DNA, 20 bp, synthetic construct
  misc_feature 1..20: note = Description of Artificial Sequence: Synthetic primer
  source 1..20: mol_type = other DNA
gcattgtatggctgttcacc

SEQ ID NO: 178 - DNA, 20 bp, synthetic construct
  misc_feature 1..20: note = Description of Artificial Sequence: Synthetic primer
  source 1..20: mol_type = other DNA
tcgaaagaccaaatcggagg

SEQ ID NO: 179 - DNA, 25 bp, synthetic construct
  misc_feature 1..25: note = Description of Artificial Sequence: Synthetic primer
  source 1..25: mol_type = other DNA
tcacaccaaaaacatctattagtcc

SEQ ID NO: 180 - DNA, 23 bp, synthetic construct
  misc_feature 1..23: note = Description of Artificial Sequence: Synthetic primer
  source 1..23: mol_type = other DNA
caaatcggaggttcataattggc

SEQ ID NO: 181 - DNA, 25 bp, synthetic construct
  misc_feature 1..25: note = Description of Artificial Sequence: Synthetic primer
  source 1..25: mol_type = other DNA
aagaaagaagtgacaagaatgctcc

SEQ ID NO: 182 - DNA, 20 bp, synthetic construct
  misc_feature 1..20: note = Description of Artificial Sequence: Synthetic primer
  source 1..20: mol_type = other DNA
actgtatagccatgttggcg

SEQ ID NO: 183 - DNA, 25 bp, synthetic construct
  misc_feature 1..25: note = Description of Artificial Sequence: Synthetic primer
  source 1..25: mol_type = other DNA
gaaattaactctttagccctactcg

SEQ ID NO: 184 - DNA, 22 bp, synthetic construct
  misc_feature 1..22: note = Description of Artificial Sequence: Synthetic primer
  source 1..22: mol_type = other DNA
agcctaaattcgagagcaatgg

SEQ ID NO: 185 - DNA, 22 bp, synthetic construct
  misc_feature 1..22: note = Description of Artificial Sequence: Synthetic primer
  source 1..22: mol_type = other DNA
tgctttcaaggataagagaggg

SEQ ID NO: 186 - DNA, 24 bp, synthetic construct
  misc_feature 1..24: note = Description of Artificial Sequence: Synthetic primer
  source 1..24: mol_type = other DNA
tcttcctcattctccattttctcc

SEQ ID NO: 187 - DNA, 23 bp, synthetic construct
  misc_feature 1..23: note = Description of Artificial Sequence: Synthetic primer
  source 1..23: mol_type = other DNA
catggagaaaatggagaatgagg

SEQ ID NO: 188 - DNA, 21 bp, synthetic construct
  misc_feature 1..21: note = Description of Artificial Sequence: Synthetic primer
  source 1..21: mol_type = other DNA
tcgcaaactcgaacaaagtcg

SEQ ID NO: 189 - DNA, 25 bp, synthetic construct
  misc_feature 1..25: note = Description of Artificial Sequence: Synthetic primer
  source 1..25: mol_type = other DNA
ttgctagagatagattgatggaagc

SEQ ID NO: 190 - DNA, 25 bp, synthetic construct
  misc_feature 1..25: note = Description of Artificial Sequence: Synthetic primer
  source 1..25: mol_type = other DNA
aaagctctaattcctccaaagttcc

SEQ ID NO: 191 - DNA, 23 bp, synthetic construct
  misc_feature 1..23: note = Description of Artificial Sequence: Synthetic primer
  source 1..23: mol_type = other DNA
accagattacatgaagatgcctt

SEQ ID NO: 192 - DNA, 23 bp, synthetic construct
  misc_feature 1..23: note = Description of Artificial Sequence: Synthetic primer
  source 1..23: mol_type = other DNA
ctaatacatcgaaccccatctca

SEQ ID NO: 193 - DNA, 25 bp, synthetic construct
  misc_feature 1..25: note = Description of Artificial Sequence: Synthetic primer
  source 1..25: mol_type = other DNA
ggtattatagtggataccaaccaac

SEQ ID NO: 194 - DNA, 20 bp, synthetic construct
  misc_feature 1..20: note = Description of Artificial Sequence: Synthetic primer
  source 1..20: mol_type = other DNA
aagccaacccaactcagtgt

SEQ ID NO: 195 - DNA, 21 bp, synthetic construct
  misc_feature 1..21: note = Description of Artificial Sequence: Synthetic primer
  source 1..21: mol_type = other DNA
acactgagttgggttggcttt

SEQ ID NO: 196 - DNA, 23 bp, synthetic construct
  misc_feature 1..23: note = Description of Artificial Sequence: Synthetic primer
  source 1..23: mol_type = other DNA
gttcctaaatcatctgcaagcct

SEQ ID NO: 197 - DNA, 20 bp, synthetic construct
  misc_feature 1..20: note = Description of Artificial Sequence: Synthetic primer
  source 1..20: mol_type = other DNA
ttgaatagaggcgacgttcc

SEQ ID NO: 198 - DNA, 23 bp, synthetic construct
  misc_feature 1..23: note = Description of Artificial Sequence: Synthetic primer
  source 1..23: mol_type = other DNA
tgctgttctagccatatttttgc

SEQ ID NO: 199 - DNA, 25 bp, synthetic construct
  misc_feature 1..25: note = Description of Artificial Sequence: Synthetic primer
  source 1..25: mol_type = other DNA
tctagtcaagtgttagcttcatctc

SEQ ID NO: 200 - DNA, 22 bp, synthetic construct
  misc_feature 1..22: note = Description of Artificial Sequence: Synthetic primer
  source 1..22: mol_type = other DNA
tttgttgttggtcgaatgatgt

SEQ ID NO: 201 - DNA, 25 bp, synthetic construct
  misc_feature 1..25: note = Description of Artificial Sequence: Synthetic primer
  source 1..25: mol_type = other DNA
agggacaagttgaagaattgaaaga

SEQ ID NO: 202 - DNA, 23 bp, synthetic construct
  misc_feature 1..23: note = Description of Artificial Sequence: Synthetic primer
  source 1..23: mol_type = other DNA
catggttggagtagtagtagtgt

SEQ ID NO: 203 - DNA, 24 bp, synthetic construct
  misc_feature 1..24: note = Description of Artificial Sequence: Synthetic primer
  source 1..24: mol_type = other DNA
gagagtggtaagtttaaggaaagc

SEQ ID NO: 204 - DNA, 22 bp, synthetic construct
  misc_feature 1..22: note = Description of Artificial Sequence: Synthetic primer
  source 1..22: mol_type = other DNA
cctagcataaagcctcactagg

SEQ ID NO: 205 - DNA, 22 bp, synthetic construct
  misc_feature 1..22: note = Description of Artificial Sequence: Synthetic primer
  source 1..22: mol_type = other DNA
ggctcttgctttcactaccacc

SEQ ID NO: 206 - DNA, 24 bp, synthetic construct
  misc_feature 1..24: note = Description of Artificial Sequence: Synthetic primer
  source 1..24: mol_type = other DNA
cctcactagggtttttctcaaagg

SEQ ID NO: 207 - DNA, 22 bp, synthetic construct
  misc_feature 1..22: note = Description of Artificial Sequence: Synthetic primer
  source 1..22: mol_type = other DNA
ggtggaaagaattagacttggc

SEQ ID NO: 208 - DNA, 20 bp, synthetic construct
  misc_feature 1..20: note = Description of Artificial Sequence: Synthetic primer
  source 1..20: mol_type = other DNA
atgtcccacctgagaattgc

SEQ ID NO: 209 - DNA, 29 bp, synthetic construct
  misc_feature 1..29: note = Description of Artificial Sequence: Synthetic primer
  source 1..29: mol_type = other DNA
acttagtccagattatttgaagacatatt

SEQ ID NO: 210 - DNA, 25 bp, synthetic construct
  misc_feature 1..25: note = Description of Artificial Sequence: Synthetic primer
  source 1..25: mol_type = other DNA
tgcatagtgaagtttgtatctctct

SEQ ID NO: 211 - DNA, 24 bp, synthetic construct
  misc_feature 1..24: note = Description of Artificial Sequence: Synthetic primer
  source 1..24: mol_type = other DNA
ttgagacctcttttgttggaatgc

SEQ ID NO: 212 - DNA, 24 bp, synthetic construct
  misc_feature 1..24: note = Description of Artificial Sequence: Synthetic primer
  source 1..24: mol_type = other DNA
aaaatctttggttgtgtagagagc

SEQ ID NO: 213 - DNA, 21 bp, synthetic construct
  misc_feature 1..21: note = Description of Artificial Sequence: Synthetic primer
  source 1..21: mol_type = other DNA
atggtgtatcggaacaagagg

SEQ ID NO: 214 - DNA, 18 bp, synthetic construct
  misc_feature 1..18: note = Description of Artificial Sequence: Synthetic primer
  source 1..18: mol_type = other DNA
aacgcagcaacactgtcc

SEQ ID NO: 215 - DNA, 28 bp, synthetic construct
  misc_feature 1..28: note = Description of Artificial Sequence: Synthetic primer
  source 1..28: mol_type = other DNA
aagtgcttgacattatctacaaagaagg

SEQ ID NO: 216 - DNA, 27 bp, synthetic construct
  misc_feature 1..27: note = Description of Artificial Sequence: Synthetic primer
  source 1..27: mol_type = other DNA
taatgggatgggatctataagcaacgc

SEQ ID NO: 217 - DNA, 23 bp, synthetic construct
  misc_feature 1..23: note = Description of Artificial Sequence: Synthetic primer
  source 1..23: mol_type = other DNA
atggcttttcaccaatttgctcc

SEQ ID NO: 218 - DNA, 23 bp, synthetic construct
  misc_feature 1..23: note = Description of Artificial Sequence: Synthetic primer
  source 1..23: mol_type = other DNA
tcgtagaactagggttatcgacc

SEQ ID NO: 219 - DNA, 23 bp, synthetic construct
  misc_feature 1..23: note = Description of Artificial Sequence: Synthetic primer
  source 1..23: mol_type = other DNA
tttgctccatcatcatccctccc

SEQ ID NO: 220 - DNA, 25 bp, synthetic construct
  misc_feature 1..25: note = Description of Artificial Sequence: Synthetic primer
  source 1..25: mol_type = other DNA
gaggtccatagttggctgatcttcg

SEQ ID NO: 221 - DNA, 25 bp, synthetic construct
  misc_feature 1..25: note = Description of Artificial Sequence: Synthetic primer
  source 1..25: mol_type = other DNA
ttgaagaaagaagtgacaagaatgg

SEQ ID NO: 222 - DNA, 23 bp, synthetic construct
  misc_feature 1..23: note = Description of Artificial Sequence: Synthetic primer
  source 1..23: mol_type = other DNA
ggtaagatattccaagcctttgc

SEQ ID NO: 223 - DNA, 25 bp, synthetic construct
  misc_feature 1..25: note = Description of Artificial Sequence: Synthetic primer
  source 1..25: mol_type = other DNA
tacatggagaaaatggagaatgagg

SEQ ID NO: 224 - DNA, 20 bp, synthetic construct
  misc_feature 1..20: note = Description of Artificial Sequence: Synthetic primer
  source 1..20: mol_type = other DNA
tgaagcggaagctcgaaagc

SEQ ID NO: 225 - DNA, 20 bp, synthetic construct
  misc_feature 1..20: note = Description of Artificial Sequence: Synthetic primer
  source 1..20: mol_type = other DNA
atcacgctttcgagcttccg

SEQ ID NO: 226 - DNA, 24 bp, synthetic construct
  misc_feature 1..24: note = Description of Artificial Sequence: Synthetic primer
  source 1..24: mol_type = other DNA
aaatcttcttggtgtgttgattgc

SEQ ID NO: 227 - DNA, 25 bp, synthetic construct
  misc_feature 1..25: note = Description of Artificial Sequence: Synthetic primer
  source 1..25: mol_type = other DNA
ttgctagagatagattgatggaagc

SEQ ID NO: 228 - DNA, 25 bp, synthetic construct
  misc_feature 1..25: note = Description of Artificial Sequence: Synthetic primer
  source 1..25: mol_type = other DNA
aaagctctaattcctccaaagttcc

SEQ ID NO: 229 - DNA, 24 bp, synthetic construct
  misc_feature 1..24: note = Description of Artificial Sequence: Synthetic primer
  source 1..24: mol_type = other DNA
gttaccagattacatgaagatgcc

SEQ ID NO: 230 - DNA, 23 bp, synthetic construct
  misc_feature 1..23: note = Description of Artificial Sequence: Synthetic primer
  source 1..23: mol_type = other DNA
actaatacatcgaaccccatctc

SEQ ID NO: 231 - DNA, 22 bp, synthetic construct
  misc_feature 1..22: note = Description of Artificial Sequence: Synthetic primer
  source 1..22: mol_type = other DNA
agttgggttggctttcaatagg

SEQ ID NO: 232 - DNA, 23 bp, synthetic construct
  misc_feature 1..23: note = Description of Artificial Sequence: Synthetic primer
  source 1..23: mol_type = other DNA
atgttcctaaatcatctgcaagc

SEQ ID NO: 233 - DNA, 22 bp, synthetic construct
  misc_feature 1..22: note = Description of Artificial Sequence: Synthetic primer
  source 1..22: mol_type = other DNA
tagaggcgacgttcctaaatcg

SEQ ID NO: 234 - DNA, 23 bp, synthetic construct
  misc_feature 1..23: note = Description of Artificial Sequence: Synthetic primer
  source 1..23: mol_type = other DNA
tgctgttctagccatatttttgc

SEQ ID NO: 235 - DNA, 25 bp, synthetic construct
  misc_feature 1..25: note = Description of Artificial Sequence: Synthetic primer
  source 1..25: mol_type = other DNA
tctagtcaagtgttagcttcatctc

SEQ ID NO: 236 - DNA, 24 bp, synthetic construct
  misc_feature 1..24: note = Description of Artificial Sequence: Synthetic primer
  source 1..24: mol_type = other DNA
tgttgttggtcgaatgatgttttg

SEQ ID NO: 237 - DNA, 27 bp, synthetic construct
  misc_feature 1..27: note = Description of Artificial Sequence: Synthetic primer
  source 1..27: mol_type = other DNA
aagaagttgttaggaaagagatattcc

SEQ ID NO: 238 - DNA, 27 bp, synthetic construct
  misc_feature 1..27: note = Description of Artificial Sequence: Synthetic primer
  source 1..27: mol_type = other DNA
agatgaaatgttaaatccatgttgtcg

SEQ ID NO: 239 - DNA, 25 bp, synthetic construct
  misc_feature 1..25: note = Description of Artificial Sequence: Synthetic primer
  source 1..25: mol_type = other DNA
tgagagtggtaagtttaaggaaagc

SEQ ID NO: 240 - DNA, 21 bp, synthetic construct
  misc_feature 1..21: note = Description of Artificial Sequence: Synthetic primer
  source 1..21: mol_type = other DNA
ggtggtagtgaaagcaagagc

SEQ ID NO: 241 - DNA, 22 bp, synthetic construct
  misc_feature 1..22: note = Description of Artificial Sequence: Synthetic primer
  source 1..22: mol_type = other DNA
ggctcttgctttcactaccacc

SEQ ID NO: 242 - DNA, 24 bp, synthetic construct
  misc_feature 1..24: note = Description of Artificial Sequence: Synthetic primer
  source 1..24: mol_type = other DNA
cctcactagggtttttctcaaagg

SEQ ID NO: 243 - DNA, 21 bp, synthetic construct
  misc_feature 1..21: note = Description of Artificial Sequence: Synthetic primer
  source 1..21: mol_type = other DNA
tgagaaaaaccctagtgaggc

SEQ ID NO: 244 - DNA, 27 bp, synthetic construct
  misc_feature 1..27: note = Description of Artificial Sequence: Synthetic primer
  source 1..27: mol_type = other DNA
ttgtagtagattgaagtccaactttgc

SEQ ID NO: 245 - DNA, 23 bp, synthetic construct
  misc_feature 1..23: note = Description of Artificial Sequence: Synthetic primer
  source 1..23: mol_type = other DNA
ttagacttggcaaacaaactacc

SEQ ID NO: 246 - DNA, 21 bp, synthetic construct
  misc_feature 1..21: note = Description of Artificial Sequence: Synthetic primer
  source 1..21: mol_type = other DNA
tatgtcccacctgagaattgc

SEQ ID NO: 247 - DNA, 30 bp, synthetic construct
  misc_feature 1..30: note = Description of Artificial Sequence: Synthetic primer
  source 1..30: mol_type = other DNA
acttagtccagattatttgaagacatatta

SEQ ID NO: 248 - DNA, 26 bp, synthetic construct
  misc_feature 1..26: note = Description of Artificial Sequence: Synthetic primer
  source 1..26: mol_type = other DNA
ttgcatagtgaagtttgtatctctct

SEQ ID NO: 249 - DNA, 22 bp, synthetic construct
  misc_feature 1..22: note = Description of Artificial Sequence: Synthetic primer
  source 1..22: mol_type = other DNA
ttccatgaagcacaatggttga

SEQ ID NO: 250 - DNA, 23 bp, synthetic construct
  misc_feature 1..23: note = Description of Artificial Sequence: Synthetic primer
  source 1..23: mol_type = other DNA
gcattccaacaaaagaggtctca

SEQ ID NO: 251 - DNA, 24 bp, synthetic construct
  misc_feature 1..24: note = Description of Artificial Sequence: Synthetic primer
  source 1..24: mol_type = other DNA
ggttacccaatgttgattgagacc

SEQ ID NO: 252 - DNA, 25 bp, synthetic construct
  misc_feature 1..25: note = Description of Artificial Sequence: Synthetic primer
  source 1..25: mol_type = other DNA
ggttgtgtagagagccattcaaata

SEQ ID NO: 253 - DNA, 21 bp, synthetic construct
  misc_feature 1..21: note = Description of Artificial Sequence: Synthetic primer
  source 1..21: mol_type = other DNA
tggtgtatcggaacaagaggc

SEQ ID NO: 254 - DNA, 19 bp, synthetic construct
  misc_feature 1..19: note = Description of Artificial Sequence: Synthetic primer
  source 1..19: mol_type = other DNA
caacgcagcaacactgtcc

SEQ ID NO: 255 - DNA, 20 bp, synthetic construct
  misc_feature 1..20: note = Description of Artificial Sequence: Synthetic primer
  source 1..20: mol_type = other DNA
acgcatcttttcgtcccttt

SEQ ID NO: 256 - DNA, 23 bp, synthetic construct
  misc_feature 1..23: note = Description of Artificial Sequence: Synthetic primer
  source 1..23: mol_type = other DNA
tgagatcaccgttactcctgata

SEQ ID NO: 257 - DNA, 21 bp, synthetic construct
  misc_feature 1..21: note = Description of Artificial Sequence: Synthetic primer
  source 1..21: mol_type = other DNA
agcagacccatttgatgaagg

SEQ ID NO: 258 - DNA, 20 bp, synthetic construct
  misc_feature 1..20: note = Description of Artificial Sequence: Synthetic primer
  source 1..20: mol_type = other DNA
cagcaggaacgaagagaccg

SEQ ID NO: 259 - DNA, 21 bp, synthetic construct
  misc_feature 1..21: note = Description of Artificial Sequence: Synthetic primer
  source 1..21: mol_type = other DNA
tcgacacaaggctaagagagg

SEQ ID NO: 260 - DNA, 20 bp, synthetic construct
  misc_feature 1..20: note = Description of Artificial Sequence: Synthetic primer
  source 1..20: mol_type = other DNA
gtccttggctgtgaacttgg

SEQ ID NO: 261 - DNA, 20 bp, synthetic construct
  misc_feature 1..20: note = Description of Artificial Sequence: Synthetic primer
  source 1..20: mol_type = other DNA
caagttcacagccaaggacc

SEQ ID NO: 262 - DNA, 25 bp, synthetic construct
  misc_feature 1..25: note = Description of Artificial Sequence: Synthetic primer
  source 1..25: mol_type = other DNA
ttatcaatttccattctatgcaggg

SEQ ID NO: 263 - DNA, 22 bp, synthetic construct
  misc_feature 1..22: note = Description of Artificial Sequence: Synthetic primer
  source 1..22: mol_type = other DNA
ggtggcgagacattggtttagc

SEQ ID NO: 264 - DNA, 22 bp, synthetic construct
  misc_feature 1..22: note = Description of Artificial Sequence: Synthetic primer
  source 1..22: mol_type = other DNA
atggattttgtaagcgcaaccc

SEQ ID NO: 265 - DNA, 25 bp, synthetic construct
  misc_feature 1..25: note = Description of Artificial Sequence: Synthetic primer
  source 1..25: mol_type = other DNA
tgctatacaaaaacttccagactcc

SEQ ID NO: 266 - DNA, 20 bp, synthetic construct
  misc_feature 1..20: note = Description of Artificial Sequence: Synthetic primer
  source 1..20: mol_type = other DNA
tgtaaagggctccatccacg

SEQ ID NO: 267 - DNA, 19 bp, synthetic construct
  misc_feature 1..19: note = Description of Artificial Sequence: Synthetic primer
  source 1..19: mol_type = other DNA
gggcaagtttgtgcgaagc

SEQ ID NO: 268 - DNA, 21 bp, synthetic construct
  misc_feature 1..21: note = Description of Artificial Sequence: Synthetic primer
  source 1..21: mol_type = other DNA
tggcactaccaaagtcatccc

SEQ ID NO: 269 - DNA, 19 bp, synthetic construct
  misc_feature 1..19: note = Description of Artificial Sequence: Synthetic primer
  source 1..19: mol_type = other DNA
atggtgtggtcagctcagg

SEQ ID NO: 270 - DNA, 21 bp, synthetic construct
  misc_feature 1..21: note = Description of Artificial Sequence: Synthetic primer
  source 1..21: mol_type = other DNA
tggcactaccaaagtcatccc

SEQ ID NO: 271 - DNA, 22 bp, synthetic construct
  misc_feature 1..22: note = Description of Artificial Sequence: Synthetic primer
  source 1..22: mol_type = other DNA
agaatcaagaaggacatgacgg

SEQ ID NO: 272 - DNA, 21 bp, synthetic construct
  misc_feature 1..21: note = Description of Artificial Sequence: Synthetic primer
  source 1..21: mol_type = other DNA
tttgttgaggcacttccatgc

SEQ ID NO: 273 - DNA, 21 bp, synthetic construct
  misc_feature 1..21: note = Description of Artificial Sequence: Synthetic primer
  source 1..21: mol_type = other DNA
aagtgcctcaacaaagaatgc

SEQ ID NO: 274 - DNA, 20 bp, synthetic construct
  misc_feature 1..20: note = Description of Artificial Sequence: Synthetic primer
  source 1..20: mol_type = other DNA
gttcttccaagtggggtagg

SEQ ID NO: 275 - DNA, 28 bp, synthetic construct
  misc_feature 1..28: note = Description of Artificial Sequence: Synthetic primer
  source 1..28: mol_type = other DNA
atggcgttgtcaataatgtcttcttacg

SEQ ID NO: 276 - DNA, 24 bp, synthetic construct
  misc_feature 1..24: note = Description of Artificial Sequence: Synthetic primer
  source 1..24: mol_type = other DNA
gagaactcgaaagtgatgaggagg

SEQ ID NO: 277 - DNA, 21 bp, synthetic construct
  misc_feature 1..21: note = Description of Artificial Sequence: Synthetic primer
  source 1..21: mol_type = other DNA
agcagacccatttgatgaagg

SEQ ID NO: 278 - DNA, 19 bp, synthetic construct
  misc_feature 1..19: note = Description of Artificial Sequence: Synthetic primer
  source 1..19: mol_type = other DNA
agcaggaacgaagtgaccg

SEQ ID NO: 279 - DNA, 29 bp, synthetic construct
  misc_feature 1..29: note = Description of Artificial Sequence: Synthetic primer
  source 1..29: mol_type = other DNA
gataaatacagggacgttttaagaaaagc

SEQ ID NO: 280 - DNA, 26 bp, synthetic construct
  misc_feature 1..26: note = Description of Artificial Sequence: Synthetic primer
  source 1..26: mol_type = other DNA
cctcgaagatatagtcaattcctagc

SEQ ID NO: 281 - DNA, 22 bp, synthetic construct
  misc_feature 1..22: note = Description of Artificial Sequence: Synthetic primer
  source 1..22: mol_type = other DNA
atatgaagcctcccatctatgc

SEQ ID NO: 282 - DNA, 23 bp, synthetic construct
  misc_feature 1..23: note = Description of Artificial Sequence: Synthetic primer
  source 1..23: mol_type = other DNA
ccattctcactgggatagacacc

SEQ ID NO: 283 - DNA, 22 bp, synthetic construct
  misc_feature 1..22: note = Description of Artificial Sequence: Synthetic primer
  source 1..22: mol_type = other DNA
ggtggcgagacattggtttagc

SEQ ID NO: 284 - DNA, 22 bp, synthetic construct
  misc_feature 1..22: note = Description of Artificial Sequence: Synthetic primer
  source 1..22: mol_type = other DNA
atggattttgtaagcgcaaccc

SEQ ID NO: 285 - DNA, 23 bp, synthetic construct
  misc_feature 1..23: note = Description of Artificial Sequence: Synthetic primer
  source 1..23: mol_type = other DNA
agaaaaacttccagactccatga

SEQ ID NO: 286 - DNA, 20 bp, synthetic construct
  misc_feature 1..20: note = Description of Artificial Sequence: Synthetic primer
  source 1..20: mol_type = other DNA
gctccatccacgcttttgat

SEQ ID NO: 287 - DNA, 24 bp, synthetic construct
  misc_feature 1..24: note = Description of Artificial Sequence: Synthetic primer
  source 1..24: mol_type = other DNA
tcaatgagtctagccatacgatct

SEQ ID NO: 288 - DNA, 20 bp, synthetic construct
  misc_feature 1..20: note = Description of Artificial Sequence: Synthetic primer
  source 1..20: mol_type = other DNA
tgtaaagggctccatccacg

SEQ ID NO: 289 - DNA, 19 bp, synthetic construct
  misc_feature 1..19: note = Description of Artificial Sequence: Synthetic primer
  source 1..19: mol_type = other DNA
gggcaagtttgtgcgaagc

SEQ ID NO: 290 - DNA, 21 bp, synthetic construct
  misc_feature 1..21: note = Description of Artificial Sequence: Synthetic primer
  source 1..21: mol_type = other DNA
tggcactaccaaagtcatccc

SEQ ID NO: 291 - DNA, 22 bp, synthetic construct
  misc_feature 1..22: note = Description of Artificial Sequence: Synthetic primer
  source 1..22: mol_type = other DNA
ggacatgacggatcttatgtgg

SEQ ID NO: 292 - DNA, 20 bp, synthetic construct
  misc_feature 1..20: note = Description of Artificial Sequence: Synthetic primer
  source 1..20: mol_type = other DNA
ttgttgaggcacttccatgc

SEQ ID NO: 293 - DNA, 19 bp, synthetic construct
  misc_feature 1..19: note = Description of Artificial Sequence: Synthetic primer
  source 1..19: mol_type = other DNA
atccagcgtttccaccacc

SEQ ID NO: 294 - DNA, 21 bp, synthetic construct
  misc_feature 1..21: note = Description of Artificial Sequence: Synthetic primer
  source 1..21: mol_type = other DNA
gttcttccaagtggggtaggc

SEQ ID NO: 295 - DNA, 24 bp, synthetic construct
  misc_feature 1..24: note = Description of Artificial Sequence: Synthetic primer
  source 1..24: mol_type = other DNA
accaatttgcttcatcatcatccc

SEQ ID NO: 296 - DNA, 22 bp, synthetic construct
  misc_feature 1..22: note = Description of Artificial Sequence: Synthetic primer
  source 1..22: mol_type = other DNA
aaatgggaggtccatagttggc

SEQ ID NO: 297 - DNA, 24 bp, synthetic construct
  misc_feature 1..24: note = Description of Artificial Sequence: Synthetic primer
  source 1..24: mol_type = other DNA
tgaaaaggatgctaattggagtgg

SEQ ID NO: 298 - DNA, 23 bp, synthetic construct
  misc_feature 1..23: note = Description of Artificial Sequence: Synthetic primer
  source 1..23: mol_type = other DNA
cgtagaagcctaaattggagagc

SEQ ID NO: 299 - DNA, 25 bp, synthetic construct
  misc_feature 1..25: note = Description of Artificial Sequence: Synthetic primer
  source 1..25: mol_type = other DNA
atcacaagacaggagagttcaaggc

SEQ ID NO: 300 - DNA, 24 bp, synthetic construct
  misc_feature 1..24: note = Description of Artificial Sequence: Synthetic primer
  source 1..24: mol_type = other DNA
attctccattgaagtggcatctcc

SEQ ID NO: 301 - DNA, 23 bp, synthetic construct
  misc_feature 1..23: note = Description of Artificial Sequence: Synthetic primer
  source 1..23: mol_type = other DNA
acttggagagaaattgcctttcg

SEQ ID NO: 302 - DNA, 24 bp, synthetic construct
  misc_feature 1..24: note = Description of Artificial Sequence: Synthetic primer
  source 1..24: mol_type = other DNA
tccaatgttccataaatgtcatgc

SEQ ID NO: 303 - DNA, 23 bp, synthetic construct
  misc_feature 1..23: note = Description of Artificial Sequence: Synthetic primer
  source 1..23: mol_type = other DNA
gcaagttggagtaagatttgagc

SEQ ID NO: 304 - DNA, 25 bp, synthetic construct
  misc_feature 1..25: note = Description of Artificial Sequence: Synthetic primer
  source 1..25: mol_type = other DNA
attagtgaaaagttgtagttcctcc

SEQ ID NO: 305 - DNA, 27 bp, synthetic construct
  misc_feature 1..27: note = Description of Artificial Sequence: Synthetic primer
  source 1..27: mol_type = other DNA
taagttaccagattatatgaagacagc

SEQ ID NO: 306 - DNA, 29 bp, synthetic construct
  misc_feature 1..29: note = Description of Artificial Sequence: Synthetic primer
  source 1..29: mol_type = other DNA
tttgtgaaattgtatgtaaagtagaaagc

SEQ ID NO: 307 - DNA, 22 bp, synthetic construct
  misc_feature 1..22: note = Description of Artificial Sequence: Synthetic primer
  source 1..22: mol_type = other DNA
agaatggatggttgtctgtggg

SEQ ID NO: 308 - DNA, 22 bp, synthetic construct
  misc_feature 1..22: note = Description of Artificial Sequence: Synthetic primer
  source 1..22: mol_type = other DNA
ggcgaactatgttaggatgacc

SEQ ID NO: 309 - DNA, 28 bp, synthetic construct
  misc_feature 1..28: note = Description of Artificial Sequence: Synthetic primer
  source 1..28: mol_type = other DNA
caattcaatgttatatgcacgatactgg

SEQ ID NO: 310 - DNA, 21 bp, synthetic construct
  misc_feature 1..21: note = Description of Artificial Sequence: Synthetic primer
  source 1..21: mol_type = other DNA
ctgagaagcatgtccatcgcc

SEQ ID NO: 311 - DNA, 27 bp, synthetic construct
  misc_feature 1..27: note = Description of Artificial Sequence: Synthetic primer
  source 1..27: mol_type = other DNA
attcaagtcttagcttcatctcaatta

SEQ ID NO: 312 - DNA, 22 bp, synthetic construct
  misc_feature 1..22: note = Description of Artificial Sequence: Synthetic primer
  source 1..22: mol_type = other DNA
cgatcaccccaaatagaagggt

SEQ ID NO: 313 - DNA, 28 bp, synthetic construct
  misc_feature 1..28: note = Description of Artificial Sequence: Synthetic primer
  source 1..28: mol_type = other DNA
tttgagagtgaaattgagaaattgttgg

SEQ ID NO: 314 - DNA, 30 bp, synthetic construct; identical to SEQ ID NO: 166
  misc_feature 1..30: note = Description of Artificial Sequence: Synthetic primer
  source 1..30: mol_type = other DNA

SEQ ID NO: 315 - DNA, 22 bp, synthetic construct
  misc_feature 1..22: note = Description of Artificial Sequence: Synthetic primer
  source 1..22: mol_type = other DNA
gcctaataaccgatgttccagg

SEQ ID NO: 316 - DNA, 25 bp, synthetic construct
  misc_feature 1..25: note = Description of Artificial Sequence: Synthetic primer
  source 1..25: mol_type = other DNA
gagatgtaaaacctagcatgaagcc

SEQ ID NO: 317 - DNA, 22 bp, synthetic construct
  misc_feature 1..22: note = Description of Artificial Sequence: Synthetic primer
  source 1..22: mol_type = other DNA
agaccatagagaggcttcatgc

SEQ ID NO: 318 - DNA, 28 bp, synthetic construct
  misc_feature 1..28: note = Description of Artificial Sequence: Synthetic primer
  source 1..28: mol_type = other DNA
cgtaatttcactaagttcctttttgtgg

SEQ ID NO: 319 - DNA, 22 bp, synthetic construct
  misc_feature 1..22: note = Description of Artificial Sequence: Synthetic primer
  source 1..22: mol_type = other DNA
ggtggaaggagcatgagtttgc

SEQ ID NO: 320 - DNA, 26 bp, synthetic construct
  misc_feature 1..26: note = Description of Artificial Sequence: Synthetic primer
  source 1..26: mol_type = other DNA
acctttgaattgctttggtaagaagc

SEQ ID NO: 321 - DNA, 27 bp, synthetic construct
  misc_feature 1..27: note = Description of Artificial Sequence: Synthetic primer
  source 1..27: mol_type = other DNA
gagtctcttatgtttcttctggtaacg

SEQ ID NO: 322 - DNA, 27 bp, synthetic construct
  misc_feature 1..27: note = Description of Artificial Sequence: Synthetic primer
  source 1..27: mol_type = other DNA
catgaacctagaaaggagagtagaagc

SEQ ID NO: 323 - DNA, 24 bp, synthetic construct
  misc_feature 1..24: note = Description of Artificial Sequence: Synthetic primer
  source 1..24: mol_type = other DNA
tgagcaaaagagaaatcacatacc

SEQ ID NO: 324 - DNA, 20 bp, synthetic construct
  misc_feature 1..20: note = Description of Artificial Sequence: Synthetic primer
  source 1..20: mol_type = other DNA
tttctttccagtgggtgtcc

SEQ ID NO: 325 - DNA, 20 bp, synthetic construct
  misc_feature 1..20: note = Description of Artificial Sequence: Synthetic primer
  source 1..20: mol_type = other DNA
ccagcagttgtgccctttcc

SEQ ID NO: 326 - DNA, 25 bp, synthetic construct
  misc_feature 1..25: note = Description of Artificial Sequence: Synthetic primer
  source 1..25: mol_type = other DNA
caatgctttctttgagcacttttcc

SEQ ID NO: 327 - DNA, 29 bp, synthetic construct
  misc_feature 1..29: note = Description of Artificial Sequence: Synthetic primer
  source 1..29: mol_type = other DNA
tcaagtcttagcttcatctcaattatgtg

SEQ ID NO: 328 - DNA, 21 bp, synthetic construct
  misc_feature 1..21: note = Description of Artificial Sequence: Synthetic primer
  source 1..21: mol_type = other DNA
gatcaccccaaatagaagggt

SEQ ID NO: 329 - DNA, 28 bp, synthetic construct
  misc_feature 1..28: note = Description of Artificial Sequence: Synthetic primer
  source 1..28: mol_type = other DNA
ttcgagagtgaaatcgagaaattattgg

SEQ ID NO: 330 - DNA, 28 bp, synthetic construct
  misc_feature 1..28: note = Description of Artificial Sequence: Synthetic primer
  source 1..28: mol_type = other DNA
atccactttgtcttaatagtctaaaccg

SEQ ID NO: 331 - DNA, 22 bp, synthetic construct
  misc_feature 1..22: note = Description of Artificial Sequence: Synthetic primer
  source 1..22: mol_type = other DNA
cttgctttcacaaccactcacc

SEQ ID NO: 332 - DNA, 25 bp, synthetic construct
  misc_feature 1..25: note = Description of Artificial Sequence: Synthetic primer
  source 1..25: mol_type = other DNA
cctctctatggtctttcttagaggc

SEQ ID NO: 333 - DNA, 22 bp, synthetic construct
  misc_feature 1..22: note = Description of Artificial Sequence: Synthetic primer
  source 1..22: mol_type = other DNA
ataaccgatgtttcaggtttgc

SEQ ID NO: 334 - DNA, 22 bp, synthetic construct
  misc_feature 1..22: note = Description of Artificial Sequence: Synthetic primer
  source 1..22: mol_type = other DNA
taaggtgagtggttgtgaaagc

SEQ ID NO: 335 - DNA, 28 bp, synthetic construct
  misc_feature 1..28: note = Description of Artificial Sequence: Synthetic primer
  source 1..28: mol_type = other DNA
gtgtatattatgaacccaaatactctcg

SEQ ID NO: 336 - DNA, 25 bp, synthetic construct
  misc_feature 1..25: note = Description of Artificial Sequence: Synthetic primer
  source 1..25: mol_type = other DNA
cctttgaattgctttggtaagaagc

SEQ ID NO: 337 - DNA, 28 bp, synthetic construct
  misc_feature 1..28: note = Description of Artificial Sequence: Synthetic primer
  source 1..28: mol_type = other DNA
gaactattggaggttattttgaagaagc

SEQ ID NO: 338 - DNA, 26 bp, synthetic construct
  misc_feature 1..26: note = Description of Artificial Sequence: Synthetic primer
  source 1..26: mol_type = other DNA
gagtggaagctgaaacaatcttaggg

SEQ ID NO: 339 - DNA, 24 bp, synthetic construct
  misc_feature 1..24: note = Description of Artificial Sequence: Synthetic primer
  source 1..24: mol_type = other DNA
tgagcaagagagaaatcacatacc

SEQ ID NO: 340 - DNA, 26 bp, synthetic construct
  misc_feature 1..26: note = Description of Artificial Sequence: Synthetic primer
  source 1..26: mol_type = other DNA
agaacacgaagtaagataggaaaagg

SEQ ID NO: 341 - DNA, 30 bp, synthetic construct
  misc_feature 1..30: note = Description of Artificial Sequence: Synthetic primer
  source 1..30: mol_type = other DNA
cacacaaatcttagtatcattatcttcaaa

SEQ ID NO: 342 - DNA, 28 bp, synthetic construct
  misc_feature 1..28: note = Description of Artificial Sequence: Synthetic primer
  source 1..28: mol_type = other DNA
caaatcttgttgtgaaatgttgtaatgt

SEQ ID NO: 343 - DNA, 22 bp, synthetic construct
  misc_feature 1..22: note = Description of Artificial Sequence: Synthetic primer
  source 1..22: mol_type = other DNA
tgtcaacaacaaaaggttgagg

SEQ ID NO: 344 - DNA, 26 bp, synthetic construct
  misc_feature 1..26: note = Description of Artificial Sequence: Synthetic primer
  source 1..26: mol_type = other DNA
tcaaaatgataagacaatcccaaacg

SEQ ID NO: 345 - DNA, 23 bp, synthetic construct
  misc_feature 1..23: note = Description of Artificial Sequence: Synthetic primer
  source 1..23: mol_type = other DNA
gaacaccatgaagacgatgatcc

SEQ ID NO: 346 - DNA, 20 bp, synthetic construct
  misc_feature 1..20: note = Description of Artificial Sequence: Synthetic primer
  source 1..20: mol_type = other DNA
tgctgacttcactaagctcc

SEQ ID NO: 347 - DNA, 23 bp, synthetic construct
  misc_feature 1..23: note = Description of Artificial Sequence: Synthetic primer
  source 1..23: mol_type = other DNA
tgcttggtaagtgatacccttgg

SEQ ID NO: 348 - DNA, 19 bp, synthetic construct
  misc_feature 1..19: note = Description of Artificial Sequence: Synthetic primer
  source 1..19: mol_type = other DNA
agggcctctctagggctcg

SEQ ID NO: 349 - DNA, 25 bp, synthetic construct
  misc_feature 1..25: note = Description of Artificial Sequence: Synthetic primer
  source 1..25: mol_type = other DNA
tgcaagagataggattgtggaattg

SEQ ID NO: 350 - DNA, 25 bp, synthetic construct
  misc_feature 1..25: note = Description of Artificial Sequence: Synthetic primer
  source 1..25: mol_type = other DNA
actcaagttcttcaagtgtaccata

SEQ ID NO: 351 - DNA, 25 bp, synthetic construct
  misc_feature 1..25: note = Description of Artificial Sequence: Synthetic primer
  source 1..25: mol_type = other DNA
ttgttatgaagagtttgagcaactg

SEQ ID NO: 352 - DNA, 29 bp, synthetic construct
  misc_feature 1..29: note = Description of Artificial Sequence: Synthetic primer
  source 1..29: mol_type = other DNA
actctgtatgtttcttctttttctagcag

SEQ ID NO: 353 - DNA, 23 bp, synthetic construct
  misc_feature 1..23: note = Description of Artificial Sequence: Synthetic primer
  source 1..23: mol_type = other DNA
tttgaatgaagctcgatgtttgc

SEQ ID NO: 354 - DNA, 28 bp, synthetic construct
  misc_feature 1..28: note = Description of Artificial Sequence: Synthetic primer
  source 1..28: mol_type = other DNA
ccattagcctacaaatagtaacagatgc

SEQ ID NO: 355 - DNA, 20 bp, synthetic construct
  misc_feature 1..20: note = Description of Artificial Sequence: Synthetic primer
  source 1..20: mol_type = other DNA
gcgtttgtgaagaggaagcc

SEQ ID NO: 356 - DNA, 23 bp, synthetic construct
  misc_feature 1..23: note = Description of Artificial Sequence: Synthetic primer
  source 1..23: mol_type = other DNA
acccttgaaaagttaagagcacg

SEQ ID NO: 357 - DNA, 27 bp, synthetic construct
  misc_feature 1..27: note = Description of Artificial Sequence: Synthetic primer
  source 1..27: mol_type = other DNA
agaaataaatgaagagtttttgaagcc

SEQ ID NO: 358 - DNA, 21 bp, synthetic construct
  misc_feature 1..21: note = Description of Artificial Sequence: Synthetic primer
  source 1..21: mol_type = other DNA
tggatgaataagcaaagcagc

SEQ ID NO: 359 - DNA, 24 bp, synthetic construct
  misc_feature 1..24: note = Description of Artificial Sequence: Synthetic primer
  source 1..24: mol_type = other DNA
gctcaagtctatgttgaaggaagc

SEQ ID NO: 360 - DNA, 24 bp, synthetic construct
  misc_feature 1..24: note = Description of Artificial Sequence: Synthetic primer
  source 1..24: mol_type = other DNA
aacatcctcagaaagcataggtcc

SEQ ID NO: 361 - DNA, 23 bp, synthetic construct
  misc_feature 1..23: note = Description of Artificial Sequence: Synthetic primer
  source 1..23: mol_type = other DNA
tcaatggttgaaatacgagaccg

SEQ ID NO: 362 - DNA, 19 bp, synthetic construct
  misc_feature 1..19: note = Description of Artificial Sequence: Synthetic primer
  source 1..19: mol_type = other DNA
atcgttgagaagtcgtccg

SEQ ID NO: 363 - DNA, 19 bp, synthetic construct
  misc_feature 1..19: note = Description of Artificial Sequence: Synthetic primer
  source 1..19: mol_type = other DNA
cgcgtggttttggctctgg

SEQ ID NO: 364 - DNA, 21 bp, synthetic construct
  misc_feature 1..21: note = Description of Artificial Sequence: Synthetic primer
  source 1..21: mol_type = other DNA
ggtgaatccgtcgtcattggc

SEQ ID NO: 365 - DNA, 22 bp, synthetic construct
  misc_feature 1..22: note = Description of Artificial Sequence: Synthetic primer
  source 1..22: mol_type = other DNA
tgcattccaacattaggtgctc

SEQ ID NO: 366 - DNA, 23 bp, synthetic construct
  misc_feature 1..23: note = Description of Artificial Sequence: Synthetic primer
  source 1..23: mol_type = other DNA
tgcttttccttgcaccatttagt

SEQ ID NO: 367 - DNA, 20 bp, synthetic construct
  misc_feature 1..20: note = Description of Artificial Sequence: Synthetic primer
  source 1..20: mol_type = other DNA
ttatgacactgcctgggtgg

SEQ ID NO: 368 - DNA, 20 bp, synthetic construct
  misc_feature 1..20: note = Description of Artificial Sequence: Synthetic primer
  source 1..20: mol_type = other DNA
gaggaagaccccatgaaccg

SEQ ID NO: 369 - DNA, 21 bp, synthetic construct
  misc_feature 1..21: note = Description of Artificial Sequence: Synthetic primer
  source 1..21: mol_type = other DNA
agagaatcagcactctgacgg

SEQ ID NO: 370 - DNA, 19 bp, synthetic construct
  misc_feature 1..19: note = Description of Artificial Sequence: Synthetic primer
  source 1..19: mol_type = other DNA
caccccatcgcttcattgc

SEQ ID NO: 371 - DNA, 20 bp, synthetic construct
  misc_feature 1..20: note = Description of Artificial Sequence: Synthetic primer
  source 1..20: mol_type = other DNA
tcaggaagctactcagaggg

SEQ ID NO: 372 - DNA, 23 bp, synthetic construct
  misc_feature 1..23: note = Description of Artificial Sequence: Synthetic primer
  source 1..23: mol_type = other DNA
acagagaaccatttttcctttgg

SEQ ID NO: 373 - DNA, 22 bp, synthetic construct
  misc_feature 1..22: note = Description of Artificial Sequence: Synthetic primer
  source 1..22: mol_type = other DNA
tatgctcgtctctcaatggtgg

SEQ ID NO: 374 - DNA, 21 bp, synthetic construct
  misc_feature 1..21: note = Description of Artificial Sequence: Synthetic primer
  source 1..21: mol_type = other DNA
agaacacactcctctccttgc

SEQ ID NO: 375 - DNA, 21 bp, synthetic construct
  misc_feature 1..21: note = Description of Artificial Sequence: Synthetic primer
  source 1..21: mol_type = other DNA
tccgagatcatcatacaccca

SEQ ID NO: 376 - DNA, 22 bp, synthetic construct
  misc_feature 1..22: note = Description of Artificial Sequence: Synthetic primer
  source 1..22: mol_type = other DNA
tctcccctagttgaaatgctgt

SEQ ID NO: 377 - DNA, 30 bp, synthetic construct
  misc_feature 1..30: note = Description of Artificial Sequence: Synthetic primer
  source 1..30: mol_type = other DNA
gaaaacttcatattgttcctcaaatgttcg

SEQ ID NO: 378 - DNA, 25 bp, synthetic construct
  misc_feature 1..25: note = Description of Artificial Sequence: Synthetic primer
  source 1..25: mol_type = other DNA
gagttcttcacggtgtattgattgg

SEQ ID NO: 379 - DNA, 23 bp, synthetic construct
  misc_feature 1..23: note = Description of Artificial Sequence: Synthetic primer
  source 1..23: mol_type = other DNA
gtgggttgtagagaataggttgg

SEQ ID NO: 380 - DNA, 21 bp, synthetic construct
  misc_feature 1..21: note = Description of Artificial Sequence: Synthetic primer
  source 1..21: mol_type = other DNA
gcgggcatcagataattcagg

SEQ ID NO: 381 - DNA, 21 bp, synthetic construct
  misc_feature 1..21: note = Description of Artificial Sequence: Synthetic primer
  source 1..21: mol_type = other DNA
cctgaattatctgatgcccgc

SEQ ID NO: 382 - DNA, 22 bp, synthetic construct
  misc_feature 1..22: note = Description of Artificial Sequence: Synthetic primer
  source 1..22: mol_type = other DNA
ctagttcctcttctgaacctcc

SEQ ID NO: 383 - DNA, 23 bp, synthetic construct
  misc_feature 1..23: note = Description of Artificial Sequence: Synthetic primer
  source 1..23: mol_type = other DNA
cagtgttgattgtttgtcggagc

SEQ ID NO: 384 - DNA, 20 bp, synthetic construct
  misc_feature 1..20: note = Description of Artificial Sequence: Synthetic primer
  source 1..20: mol_type = other DNA
ttgtcacactacgtccttgc

SEQ ID NO: 385 - DNA, 25 bp, synthetic construct
  misc_feature 1..25: note = Description of Artificial Sequence: Synthetic primer
  source 1..25: mol_type = other DNA
aagatcagccaactatgatcctccc

SEQ ID NO: 386 - DNA, 30 bp, synthetic construct
  misc_feature 1..30: note = Description of Artificial Sequence: Synthetic primer
  source 1..30: mol_type = other DNA
atggaagagactgaatgaaatcaaaagacc

SEQ ID NO: 387 - DNA, 25 bp, synthetic construct
  misc_feature 1..25: note = Description of Artificial Sequence: Synthetic primer
  source 1..25: mol_type = other DNA
ttagaagatcagccaactatgatcc

SEQ ID NO: 388 - DNA, 25 bp, synthetic construct
  misc_feature 1..25: note = Description of Artificial Sequence: Synthetic primer
  source 1..25: mol_type = other DNA
gaatgaaatcaaaagaccaaatggg

SEQ ID NO: 389 - DNA, 29 bp, synthetic construct
  misc_feature 1..29: note = Description of Artificial Sequence: Synthetic primer
  source 1..29: mol_type = other DNA
aaagaagaagtgaaaaagatgttagttgg

SEQ ID NO: 390 - DNA, 25 bp, synthetic construct
  misc_feature 1..25: note = Description of Artificial Sequence: Synthetic primer
  source 1..25: mol_type = other DNA
aaaagcctaaattcgagagcagtgg

SEQ ID NO: 391 - DNA, 21 bp, synthetic construct
  misc_feature 1..21: note = Description of Artificial Sequence: Synthetic primer
  source 1..21: mol_type = other DNA
gagacgggaaagttcaaagcg

SEQ ID NO: 392 - DNA, 20 bp, synthetic construct
  misc_feature 1..20: note = Description of Artificial Sequence: Synthetic primer
  source 1..20: mol_type = other DNA
tgaagtggcatctccaaggc

SEQ ID NO: 393 - DNA, 25 bp, synthetic construct
  misc_feature 1..25: note = Description of Artificial Sequence: Synthetic primer
  source 1..25: mol_type = other DNA
gcttcattctatgtgaaaaatggcg

SEQ ID NO: 394 - DNA, 20 bp, synthetic construct
  misc_feature 1..20: note = Description of Artificial Sequence: Synthetic primer
  source 1..20: mol_type = other DNA
cgcaaattcaagcaaagtgc

SEQ ID NO: 395 - DNA, 27 bp, synthetic construct
  misc_feature 1..27: note = Description of Artificial Sequence: Synthetic primer
  source 1..27: mol_type = other DNA
aaatggtttatgctagagatagattgg

SEQ ID NO: 396 - DNA, 25 bp, synthetic construct
  misc_feature 1..25: note = Description of Artificial Sequence: Synthetic primer
  source 1..25: mol_type = other DNA
cttgcagatattctcctaaagtggc

SEQ ID NO: 397 - DNA, 20 bp, synthetic construct
  misc_feature 1..20: note = Description of Artificial Sequence: Synthetic primer
  source 1..20: mol_type = other DNA
agaggcttttctatggcagg

SEQ ID NO: 398 - DNA, 24 bp, synthetic construct
  misc_feature 1..24: note = Description of Artificial Sequence: Synthetic primer
  source 1..24: mol_type = other DNA
aagctctaattcttccaatgttcc

SEQ ID NO: 399 - DNA, 27 bp, synthetic construct
  misc_feature 1..27: note = Description of Artificial Sequence: Synthetic primer
  source 1..27: mol_type = other DNA
tgcctttctttactttatttaacaccg

SEQ ID NO: 400 - DNA, 23 bp, synthetic construct
  misc_feature 1..23: note = Description of Artificial Sequence: Synthetic primer
  source 1..23: mol_type = other DNA
gctcttctaacacatcatacgcc

SEQ ID NO: 401 - DNA, 20 bp, synthetic construct
  misc_feature 1..20: note = Description of Artificial Sequence: Synthetic primer
  source 1..20: mol_type = other DNA
acaccgtaaatgaaatggcg

SEQ ID NO: 402 - DNA, 23 bp, synthetic construct
  misc_feature 1..23: note = Description of Artificial Sequence: Synthetic primer
  source 1..23: mol_type = other DNA
cgagttcttgaggtattcaacgc

SEQ ID NO: 403 - DNA, 21 bp, synthetic construct
  misc_feature 1..21: note = Description of Artificial Sequence: Synthetic primer
  source 1..21: mol_type = other DNA
tgggcagagttatgtagatgc

SEQ ID NO: 404 - DNA, 19 bp, synthetic construct
  misc_feature 1..19: note = Description of Artificial Sequence: Synthetic primer
  source 1..19: mol_type = other DNA
tcctattgaaagcgaggcg

SEQ ID NO: 405 - DNA, 19 bp, synthetic construct
  misc_feature 1..19: note = Description of Artificial Sequence: Synthetic primer
  source 1..19: mol_type = other DNA
acgcctcgctttcaatagg

SEQ ID NO: 406 - DNA, 21 bp, synthetic construct
  misc_feature 1..21: note = Description of Artificial Sequence: Synthetic primer
  source 1..21: mol_type = other DNA
ctgcaagtcgtaacatcaagg

SEQ ID NO: 407 - DNA, 26 bp, synthetic construct
  misc_feature 1..26: note = Description of Artificial Sequence: Synthetic primer
  source 1..26: mol_type = other DNA
tggaagaggcaaaatggttttatagc

SEQ ID NO: 408 - DNA, 27 bp, synthetic construct
  misc_feature 1..27: note = Description of Artificial Sequence: Synthetic primer
  source 1..27: mol_type = other DNA
gatcatctgcaagtcgtaacatcaagg

SEQ ID NO: 409 - DNA, 24 bp, synthetic construct
  misc_feature 1..24: note = Description of Artificial Sequence: Synthetic primer
  source 1..24: mol_type = other DNA
aaagaggtgacattcttaaatcgg

SEQ ID NO: 410 - DNA, 29 bp, synthetic construct
  misc_feature 1..29: note = Description of Artificial Sequence: Synthetic primer
  source 1..29: mol_type = other DNA
agttatattcatcttcatcattcatctcc

SEQ ID NO: 411 - DNA, 23 bp, synthetic construct
  misc_feature 1..23: note = Description of Artificial Sequence: Synthetic primer
  source 1..23: mol_type = other DNA
ggtgtttctgaagatgaagctcg

SEQ ID NO: 412 - DNA, 24 bp, synthetic construct
  misc_feature 1..24: note = Description of Artificial Sequence: Synthetic primer
  source 1..24: mol_type = other DNA
ctgaaatacgtttccttgaatggc

SEQ ID NO: 413 - DNA, 26 bp, synthetic construct
  misc_feature 1..26: note = Description of Artificial Sequence: Synthetic primer
  source 1..26: mol_type = other DNA
tctcgaagatcagcaaactatcaacc

SEQ ID NO: 414 - DNA, 24 bp, synthetic construct
  misc_feature 1..24: note = Description of Artificial Sequence: Synthetic primer
  source 1..24: mol_type = other DNA
acataatcaaattgccaaagtggg

SEQ ID NO: 415 - DNA, 27 bp, synthetic construct
  misc_feature 1..27: note = Description of Artificial Sequence: Synthetic primer
  source 1..27: mol_type = other DNA
agacttggaatctcttatcactttgag

SEQ ID NO: 416 - DNA, 27 bp, synthetic construct
  misc_feature 1..27: note = Description of Artificial Sequence: Synthetic primer
  source 1..27: mol_type = other DNA
ggcatacacattatttttgttggtgtt

SEQ ID NO: 417 - DNA, 26 bp, synthetic construct
  misc_feature 1..26: note = Description of Artificial Sequence: Synthetic primer
  source 1..26: mol_type = other DNA
gtacaacaccaacaaaaataatgtgt

SEQ ID NO: 418 - DNA, 25 bp, synthetic construct
  misc_feature 1..25: note = Description of Artificial Sequence: Synthetic primer
  source 1..25: mol_type = other DNA
tcgtaggagtctaaattcaagagaa

SEQ ID NO: 419 - DNA, 23 bp, synthetic construct
  misc_feature 1..23: note = Description of Artificial Sequence: Synthetic primer
  source 1..23: mol_type = other DNA
gaggcaattttatggtgtgtacc

SEQ ID NO: 420 - DNA, 23 bp, synthetic construct
  misc_feature 1..23: note = Description of Artificial Sequence: Synthetic primer
  source 1..23: mol_type = other DNA
ttgttttgtgtcttgtctcttcc

SEQ ID NO: 421 - DNA, 20 bp, synthetic construct
  misc_feature 1..20: note = Description of Artificial Sequence: Synthetic primer
  source 1..20: mol_type = other DNA
tgggaaagcactgatatggg

SEQ ID NO: 422 - DNA, 23 bp, synthetic construct
  misc_feature 1..23: note = Description of Artificial Sequence: Synthetic primer
  source 1..23: mol_type = other DNA
agctccaattcatctagtgtacc

SEQ ID NO: 423 - DNA, 23 bp, synthetic construct
  misc_feature 1..23: note = Description of Artificial Sequence: Synthetic primer
  source 1..23: mol_type = other DNA
tgggacattagtgctatggatgg

SEQ ID NO: 424 - DNA, 27 bp, synthetic construct
  misc_feature 1..27: note = Description of Artificial Sequence: Synthetic primer
  source 1..27: mol_type = other DNA
tctgaaggaattttattatatggaggc

SEQ ID NO: 425 - DNA, 26 bp, synthetic construct
  misc_feature 1..26: note = Description of Artificial Sequence: Synthetic primer
  source 1..26: mol_type = other DNA
agatttgaagagtacattgagaatgc

SEQ ID NO: 426 - DNA, 25 bp, synthetic construct
  misc_feature 1..25: note = Description of Artificial Sequence: Synthetic primer
  source 1..25: mol_type = other DNA
cgatgaatgtcgtattatggtaggg

SEQ ID NO: 427 - DNA, 21 bp, synthetic construct
  misc_feature 1..21: note = Description of Artificial Sequence: Synthetic primer
  source 1..21: mol_type = other DNA
agaggaagctcgtcaacgtat

SEQ ID NO: 428 - DNA, 21 bp, synthetic construct
  misc_feature 1..21: note = Description of Artificial Sequence: Synthetic primer
  source 1..21: mol_type = other DNA
atgtgccattctaccaaggtt

SEQ ID NO: 429 - DNA, 25 bp, synthetic construct
  misc_feature 1..25: note = Description of Artificial Sequence: Synthetic primer
  source 1..25: mol_type = other DNA
gacttggaatctcttaccactttga

SEQ ID NO: 430 - DNA, 25 bp, synthetic construct
  misc_feature 1..25: note = Description of Artificial Sequence: Synthetic primer
  source 1..25: mol_type = other DNA
accatgttgtcttaggagtctaaat

SEQ ID NO: 431 - DNA, 25 bp, synthetic construct
  misc_feature 1..25: note = Description of Artificial Sequence: Synthetic primer
  source 1..25: mol_type = other DNA
gaatagttctcgaagatcagcaaac

SEQ ID NO: 432 - DNA, 20 bp, synthetic construct
  misc_feature 1..20: note = Description of Artificial Sequence: Synthetic primer
  source 1..20: mol_type = other DNA
caaattgccaaagtgggggt

SEQ ID NO: 433 - DNA, 24 bp, synthetic construct
  misc_feature 1..24: note = Description of Artificial Sequence: Synthetic primer
  source 1..24: mol_type = other DNA
gcaaagacttggaatctcttacca

SEQ ID NO: 434 - DNA, 22 bp, synthetic construct
  misc_feature 1..22: note = Description of Artificial Sequence: Synthetic primer
  source 1..22: mol_type = other DNA
gagacaccggataaccatgttg

SEQ ID NO: 435 - DNA, 23 bp, synthetic construct
  misc_feature 1..23: note = Description of Artificial Sequence: Synthetic primer
  source 1..23: mol_type = other DNA
gaggcaattttatggtgtcttcc

SEQ ID NO: 436 - DNA, 22 bp, synthetic construct
  misc_feature 1..22: note = Description of Artificial Sequence: Synthetic primer
  source 1..22: mol_type = other DNA
tgttgtgtgtcttgtctcttcc

SEQ ID NO: 437 - DNA, 20 bp, synthetic construct
  misc_feature 1..20: note = Description of Artificial Sequence: Synthetic primer
  source 1..20: mol_type = other DNA
gtgggaaagcactggtatgg

SEQ ID NO: 438 - DNA, 23 bp, synthetic construct
  misc_feature 1..23: note = Description of Artificial Sequence: Synthetic primer
  source 1..23: mol_type = other DNA
agctccaattcatctagtgtacc

SEQ ID NO: 439 - DNA, 21 bp, synthetic construct
  misc_feature 1..21: note = Description of Artificial Sequence: Synthetic primer
  source 1..21: mol_type = other DNA
ttagtgctatggatgggctcc

SEQ ID NO: 440 - DNA, 28 bp, synthetic construct
  misc_feature 1..28: note = Description of Artificial Sequence: Synthetic primer
  source 1..28: mol_type = other DNA
cgatttctgaaggacttttattatatgg

SEQ ID NO: 441 - DNA, 26 bp, synthetic construct
  misc_feature 1..26: note = Description of Artificial Sequence: Synthetic primer
  source 1..26: mol_type = other DNA
agagaagcaagatggtattatgatgg

SEQ ID NO: 442 - DNA, 25 bp, synthetic construct
  misc_feature 1..25: note = Description of Artificial Sequence: Synthetic primer
  source 1..25: mol_type = other DNA
cgatgaatgtcgtattatggtaggg

SEQ ID NO: 443 - DNA, 21 bp, synthetic construct
  misc_feature 1..21: note = Description of Artificial Sequence: Synthetic primer
  source 1..21: mol_type = other DNA
tggcgtgtctgaagaagaagc

SEQ ID NO: 444 - DNA, 23 bp, synthetic construct
  misc_feature 1..23: note = Description of Artificial Sequence: Synthetic primer
  source 1..23: mol_type = other DNA
aacattggagagtagtcatcacc

SEQ ID NO: 445 - DNA, 23 bp, synthetic construct
  misc_feature 1..23: note = Description of Artificial Sequence: Synthetic primer
  source 1..23: mol_type = other DNA
catgatggtgatgactactctcc

SEQ ID NO: 446 - DNA, 23 bp, synthetic construct
  misc_feature 1..23: note = Description of Artificial Sequence: Synthetic primer
  source 1..23: mol_type = other DNA
agtacatgatcttttgtttggcg

SEQ ID NO: 447 - DNA, 22 bp, synthetic construct
  misc_feature 1..22: note = Description of Artificial Sequence: Synthetic primer
  source 1..22: mol_type = other DNA
tgcaaagaagaacgagtgaagg

SEQ ID NO: 448 - DNA, 30 bp, synthetic construct
  misc_feature 1..30: note = Description of Artificial Sequence: Synthetic primer
  source 1..30: mol_type = other DNA
tgtttgtagtagtttagatcatgtttttcc

SEQ ID NO: 449 - DNA, 22 bp, synthetic construct
  misc_feature 1..22: note = Description of Artificial Sequence: Synthetic primer
  source 1..22: mol_type = other DNA
ataaccgatgtttcgggtttgc

SEQ ID NO: 450 - DNA, 25 bp, synthetic construct
  misc_feature 1..25: note = Description of Artificial Sequence: Synthetic primer
  source 1..25: mol_type = other DNA
cctctctatggtctttcttaatggc

SEQ ID NO: 451 - DNA, 25 bp, synthetic construct
  misc_feature 1..25: note = Description of Artificial Sequence: Synthetic primer
  source 1..25: mol_type = other DNA
gaaagctaacaaccaaaatctctgc

SEQ ID NO: 452 - DNA, 22 bp, synthetic construct
  misc_feature 1..22: note = Description of Artificial Sequence: Synthetic primer
  source 1..22: mol_type = other DNA
ttgcatggcttgggtaagaagc

SEQ ID NO: 453 - DNA, 23 bp, synthetic construct
  misc_feature 1..23: note = Description of Artificial Sequence: Synthetic primer
  source 1..23: mol_type = other DNA
agaagaagctcgatggttgaacg

SEQ ID NO: 454 - DNA, 23 bp, synthetic construct
  misc_feature 1..23: note = Description of Artificial Sequence: Synthetic primer
  source 1..23: mol_type = other DNA
catgaacctagcaagtagagtgg

SEQ ID NO: 455 - DNA, 21 bp, synthetic construct
  misc_feature 1..21: note = Description of Artificial Sequence: Synthetic primer
  source 1..21: mol_type = other DNA
gccaactgttatgcctttccc

SEQ ID NO: 456 - DNA, 26 bp, synthetic construct
  misc_feature 1..26: note = Description of Artificial Sequence: Synthetic primer
  source 1..26: mol_type = other DNA
gggattggatctataagtaaagcagc

SEQ ID NO: 457 - DNA, 21 bp, synthetic construct
  misc_feature 1..21: note = Description of Artificial Sequence: Synthetic primer
  source 1..21: mol_type = other DNA
atgctaccccatccaatgtgc

SEQ ID NO: 458 - DNA, 28 bp, synthetic construct
  misc_feature 1..28: note = Description of Artificial Sequence: Synthetic primer
  source 1..28: mol_type = other DNA
aatataatcgaaagaccaaatggagggc

SEQ ID NO: 459 - DNA, 27 bp, synthetic construct
  misc_feature 1..27: note = Description of Artificial Sequence: Synthetic primer
  source 1..27: mol_type = other DNA
attagttgagatggaaaactctttagc

SEQ ID NO: 460 - DNA, 23 bp, synthetic construct
  misc_feature 1..23: note = Description of Artificial Sequence: Synthetic primer
  source 1..23: mol_type = other DNA
atagccatgttgacgtagaagcc

SEQ ID NO: 461 - DNA, 20 bp, synthetic construct
  misc_feature 1..20: note = Description of Artificial Sequence: Synthetic primer
  source 1..20: mol_type = other DNA
agctcccacttcatcggagg

SEQ ID NO: 462 - DNA, 24 bp, synthetic construct
  misc_feature 1..24: note = Description of Artificial Sequence: Synthetic primer
  source 1..24: mol_type = other DNA
tttggctaactcaagcaacatagg

SEQ ID NO: 463 - DNA, 28 bp, synthetic construct
  misc_feature 1..28: note = Description of Artificial Sequence: Synthetic primer
  source 1..28: mol_type = other DNA
agacatactaaacttggagagaaattga

SEQ ID NO: 464 - DNA, 28 bp, synthetic construct
  misc_feature 1..28: note = Description of Artificial Sequence: Synthetic primer
  source 1..28: mol_type = other DNA
tattccataagaaacattccatcaatcg

SEQ ID NO: 465 - DNA, 24 bp, synthetic construct
  misc_feature 1..24: note = Description of Artificial Sequence: Synthetic primer
  source 1..24: mol_type = other DNA
ggagacatactaaacttggagaga

SEQ ID NO: 466 - DNA, 25 bp, synthetic construct
  misc_feature 1..25: note = Description of Artificial Sequence: Synthetic primer
  source 1..25: mol_type = other DNA
gctttggtgaaaagctctaattcat

SEQ ID NO: 467 - DNA, 25 bp, synthetic construct
  misc_feature 1..25: note = Description of Artificial Sequence: Synthetic primer
  source 1..25: mol_type = other DNA
agttaccagaatacatgaagatgcc

SEQ ID NO: 468 - DNA, 24 bp, synthetic construct
  misc_feature 1..24: note = Description of Artificial Sequence: Synthetic primer
  source 1..24: mol_type = other DNA
tgaatgttgatggagatttcttgg

SEQ ID NO: 469 - DNA, 24 bp, synthetic construct
  misc_feature 1..24: note = Description of Artificial Sequence: Synthetic primer
  source 1..24: mol_type = other DNA
aaatggttggatttcagtaggagc

SEQ ID NO: 470 - DNA, 30 bp, synthetic construct
  misc_feature 1..30: note = Description of Artificial Sequence: Synthetic primer
  source 1..30: mol_type = other DNA
gaaaatctctttagtatttgtaattgtgcc

SEQ ID NO: 471 - DNA, 23 bp, synthetic construct
  misc_feature 1..23: note = Description of Artificial Sequence: Synthetic primer
  source 1..23: mol_type = other DNA
aattgaaaagaggtgatgctccg

SEQ ID NO: 472 - DNA, 30 bp, synthetic construct
  misc_feature 1..30: note = Description of Artificial Sequence: Synthetic primer
  source 1..30: mol_type = other DNA
tttggattgattatcttgagaactatgacc

SEQ ID NO: 473 - DNA, 22 bp, synthetic construct
  misc_feature 1..22: note = Description of Artificial Sequence: Synthetic primer
  source 1..22: mol_type = other DNA
aaagatcaaccagcagcaatcg

SEQ ID NO: 474 - DNA, 23 bp, synthetic construct
  misc_feature 1..23: note = Description of Artificial Sequence: Synthetic primer
  source 1..23: mol_type = other DNA
gtgggtttgtagtttcctgatcg

SEQ ID NO: 475 - DNA, 28 bp, synthetic construct
  misc_feature 1..28: note = Description of Artificial Sequence: Synthetic primer
  source 1..28: mol_type = other DNA
aaggagagtgaaaatcctttagttaagc

SEQ ID NO: 476 - DNA, 24 bp, synthetic construct
  misc_feature 1..24: note = Description of Artificial Sequence: Synthetic primer
  source 1..24: mol_type = other DNA
gagtttgaaatgaagagcagtggc

SEQ ID NO: 477 - DNA, 25 bp, synthetic construct
  misc_feature 1..25: note = Description of Artificial Sequence: Synthetic primer
  source 1..25: mol_type = other DNA
aatgccttcaaaaacgagcaaaagg

SEQ ID NO: 478 - DNA, 28 bp, synthetic construct
  misc_feature 1..28: note = Description of Artificial Sequence: Synthetic primer
  source 1..28: mol_type = other DNA
gtcatcaagtattgtttgagatgtttgg

SEQ ID NO: 479 - DNA, 21 bp, synthetic construct
  misc_feature 1..21: note = Description of Artificial Sequence: Synthetic primer
  source 1..21: mol_type = other DNA
tggcattgaaatatgaggcgg

SEQ ID NO: 480 - DNA, 22 bp, synthetic construct
  misc_feature 1..22: note = Description of Artificial Sequence: Synthetic primer
  source 1..22: mol_type = other DNA
gctgaagctcatctagtgtacc

SEQ ID NO: 481 - DNA, 25 bp, synthetic construct
  misc_feature 1..25: note = Description of Artificial Sequence: Synthetic primer
  source 1..25: mol_type = other DNA
ataaatgaactggatcagctacccg

SEQ ID NO: 482 - DNA, 28 bp, synthetic construct
  misc_feature 1..28: note = Description of Artificial Sequence: Synthetic primer
  source 1..28: mol_type = other DNA
gatggtgtgaatcccattttctttgagg

SEQ ID NO: 483 - DNA, 21 bp, synthetic construct
  misc_feature 1..21: note = Description of Artificial Sequence: Synthetic primer
  source 1..21: mol_type = other DNA
ttgggggatctgtgtaaatgc

SEQ ID NO: 484 - DNA, 24 bp, synthetic construct
  misc_feature 1..24: note = Description of Artificial Sequence: Synthetic primer
  source 1..24: mol_type = other DNA
cagttcctgagacacgtaaaatgg

SEQ ID NO: 485 - DNA, 20 bp, synthetic construct
  misc_feature 1..20: note = Description of Artificial Sequence: Synthetic primer
  source 1..20: mol_type = other DNA
gcagtgcatggcttttcacc

SEQ ID NO: 486 - DNA, 22 bp, synthetic construct
  misc_feature 1..22: note = Description of Artificial Sequence: Synthetic primer
  source 1..22: mol_type = other DNA
tccaaatagggagggatgatga

SEQ ID NO: 487 - DNA, 24 bp, synthetic construct
  misc_feature 1..24: note = Description of Artificial Sequence: Synthetic primer
  source 1..24: mol_type = other DNA
acaatgtactgtggtcgataaccc

SEQ ID NO: 488 - DNA, 27 bp, synthetic construct
  misc_feature 1..27: note = Description of Artificial Sequence: Synthetic primer
  source 1..27: mol_type = other DNA
aatgaaatcaaaagaccaaatgggagg

SEQ ID NO: 489 - DNA, 25 bp, synthetic construct
  misc_feature 1..25: note = Description of Artificial Sequence: Synthetic primer
  source 1..25: mol_type = other DNA
gagaaagacgtgaaaaggatactgg

SEQ ID NO: 490 - DNA, 24 bp, synthetic construct
  misc_feature 1..24: note = Description of Artificial Sequence: Synthetic primer
  source 1..24: mol_type = other DNA
tcaaatccatattggcgtagaagc

SEQ ID NO: 491 - DNA, 24 bp, synthetic construct
  misc_feature 1..24: note = Description of Artificial Sequence: Synthetic primer
  source 1..24: mol_type = other DNA
agcttcattctatgggaaaaaggg

SEQ ID NO: 492 - DNA, 21 bp, synthetic construct
  misc_feature 1..21: note = Description of Artificial Sequence: Synthetic primer
  source 1..21: mol_type = other DNA
tgaaccacctagcttccaacc

SEQ ID NO: 493 - DNA, 29 bp, synthetic construct
  misc_feature 1..29: note = Description of Artificial Sequence: Synthetic primer
  source 1..29: mol_type = other DNA
gcaatctaaacttggagaaaagaaaatgg

SEQ ID NO: 494 - DNA, 24 bp, synthetic construct
  misc_feature 1..24: note = Description of Artificial Sequence: Synthetic primer
  source 1..24: mol_type = other DNA
tttgtgaaaagctctaattcctcc

SEQ ID NO: 495 - DNA, 27 bp, synthetic construct
  misc_feature 1..27: note = Description of Artificial Sequence: Synthetic primer
  source 1..27: mol_type = other DNA
catgcttattttgctttcacaaatccc

SEQ ID NO: 496 - DNA, 29 bp, synthetic construct
  misc_feature 1..29: note = Description of Artificial Sequence: Synthetic primer
  source 1..29: mol_type = other DNA
taggtcatcttcaagtcgtaaaagtatgg

SEQ ID NO: 497 - DNA, 24 bp, synthetic construct
  misc_feature 1..24: note = Description of Artificial Sequence: Synthetic primer
  source 1..24: mol_type = other DNA
gagatgaaaagaggagatgttccg

SEQ ID NO: 498 - DNA, 23 bp, synthetic construct
  misc_feature 1..23: note = Description of Artificial Sequence: Synthetic primer
  source 1..23: mol_type = other DNA
aagcatgtccatcaccataaagg

SEQ ID NO: 499 - DNA, 30 bp, synthetic construct
  misc_feature 1..30: note = Description of Artificial Sequence: Synthetic primer
  source 1..30: mol_type = other DNA
aaacatggaaagagatgaataaagaaatgg

SEQ ID NO: 500 - DNA, 26 bp, synthetic construct
  misc_feature 1..26: note = Description of Artificial Sequence: Synthetic primer
  source 1..26: mol_type = other DNA
gagaagcatgtccatcaccataaagg

SEQ ID NO: 501 - DNA, 21 bp, synthetic construct
  misc_feature 1..21: note = Description of Artificial Sequence: Synthetic primer
  source 1..21: mol_type = other DNA
attcaaagaacaaccggaagc

SEQ ID NO: 502 - DNA, 21 bp, synthetic construct
  misc_feature 1..21: note = Description of Artificial Sequence: Synthetic primer
  source 1..21: mol_type = other DNA
aaaaatgagcatcccacaacg

SEQ ID NO: 503 - DNA, 27 bp, synthetic construct
  misc_feature 1..27: note = Description of Artificial Sequence: Synthetic primer
  source 1..27: mol_type = other DNA
aaagctatgggaaaagaatcaatgagc

SEQ ID NO: 504 - DNA, 24 bp, synthetic construct
  misc_feature 1..24: note = Description of Artificial Sequence: Synthetic primer
  source 1..24: mol_type = other DNA
ggagtttgaaatgaagagcagtgg

SEQ ID NO: 505 - DNA, 26 bp, synthetic construct
  misc_feature 1..26: note = Description of Artificial Sequence: Synthetic primer
  source 1..26: mol_type = other DNA
gaggcttcattctattcatttagggg

SEQ ID NO: 506 - DNA, 25 bp, synthetic construct
  misc_feature 1..25: note = Description of Artificial Sequence: Synthetic primer
  source 1..25: mol_type = other DNA
tcaacagatttagtttgacattgcc

SEQ ID NO: 507 - DNA, 23 bp, synthetic construct
  misc_feature 1..23: note = Description of Artificial Sequence: Synthetic primer
  source 1..23: mol_type = other DNA
tctaggttgacagaaaggctacc

SEQ ID NO: 508 - DNA, 24 bp, synthetic construct
  misc_feature 1..24: note = Description of Artificial Sequence: Synthetic primer
  source 1..24: mol_type = other DNA
gtccatgagtgttagcaagagacc

SEQ ID NO: 509 - DNA, 26 bp, synthetic construct
  misc_feature 1..26: note = Description of Artificial Sequence: Synthetic primer
  source 1..26: mol_type = other DNA
tataaatgaattggatcagctacccg

SEQ ID NO: 510 - DNA, 30 bp, synthetic construct
  misc_feature 1..30: note = Description of Artificial Sequence: Synthetic primer
  source 1..30: mol_type = other DNA
tataaaaagcaacaaacaatatcttcatgt

SEQ ID NO: 511 - DNA, 22 bp, synthetic construct
  misc_feature 1..22: note = Description of Artificial Sequence: Synthetic primer
  source 1..22: mol_type = other DNA
gttgggggatctgtgtaaatgc

SEQ ID NO: 512 - DNA, 25 bp, synthetic construct
  misc_feature 1..25: note = Description of Artificial Sequence: Synthetic primer
  source 1..25: mol_type = other DNA
agttggatattgaagcaagtgttcc

SEQ ID NO: 513 - DNA, 25 bp, synthetic construct
  misc_feature 1..25: note = Description of Artificial Sequence: Synthetic primer
  source 1..25: mol_type = other DNA
tgtgtaaatgctatatggaggaggc

SEQ ID NO: 514 - DNA, 24 bp, synthetic construct
  misc_feature 1..24: note = Description of Artificial Sequence: Synthetic primer
  source 1..24: mol_type = other DNA
tcgaaagacagttcctgagacacg

SEQ ID NO: 515 - DNA, 20 bp, synthetic construct
  misc_feature 1..20: note = Description of Artificial Sequence: Synthetic primer
  source 1..20: mol_type = other DNA
tgctacatgcgtgaaaaggg

SEQ ID NO: 516 - DNA, 19 bp, synthetic construct
  misc_feature 1..19: note = Description of Artificial Sequence: Synthetic primer
  source 1..19: mol_type = other DNA
agtaccaaagccatcaccc

SEQ ID NO: 517 - DNA, 27 bp, synthetic construct
  misc_feature 1..27: note = Description of Artificial Sequence: Synthetic primer
  source 1..27: mol_type = other DNA
ttaatatcatcatcactaccttgcatt

SEQ ID NO: 518 - DNA, 26 bp, synthetic construct
  misc_feature 1..26: note = Description of Artificial Sequence: Synthetic primer
  source 1..26: mol_type = other DNA
ggactaatagatgtttttggtgtgaa

SEQ ID NO: 519 - DNA, 28 bp, synthetic construct
  misc_feature 1..28: note = Description of Artificial Sequence: Synthetic primer
  source 1..28: mol_type = other DNA
caatgtactgtggtcaataatagtagcc

SEQ ID NO: 520 - DNA, 22 bp, synthetic construct
  misc_feature 1..22: note = Description of Artificial Sequence: Synthetic primer
  source 1..22: mol_type = other DNA
aatcgaaagaccaaatcggagg

SEQ ID NO: 521 - DNA, 24 bp, synthetic construct
  misc_feature 1..24: note = Description of Artificial Sequence: Synthetic primer
  source 1..24: mol_type = other DNA
ataagggagaatcctatacaaggc

SEQ ID NO: 522 - DNA, 22 bp, synthetic construct
  misc_feature 1..22: note = Description of Artificial Sequence: Synthetic primer
  source 1..22: mol_type = other DNA
cctaaattcgagagcaatgggg

SEQ ID NO: 523 - DNA, 22 bp, synthetic construct
  misc_feature 1..22: note = Description of Artificial Sequence: Synthetic primer
  source 1..22: mol_type = other DNA
agcatattggaggaagctaggg

SEQ ID NO: 524 - DNA, 21 bp, synthetic construct
  misc_feature 1..21: note = Description of Artificial Sequence: Synthetic primer
  source 1..21: mol_type = other DNA
tcgataaaccacttggcctcc

SEQ ID NO: 525 - DNA, 27 bp, synthetic construct
  misc_feature 1..27: note = Description of Artificial Sequence: Synthetic primer
  source 1..27: mol_type = other DNA
gatctaaaacatttgtctaggtggtgg

SEQ ID NO: 526 - DNA, 26 bp, synthetic construct
  misc_feature 1..26: note = Description of Artificial Sequence: Synthetic primer
  source 1..26: mol_type = other DNA
attctcctaaagtagctgaaatctgg

SEQ ID NO: 527 - DNA, 20 bp, synthetic construct
  misc_feature 1..20: note = Description of Artificial Sequence: Synthetic primer
  source 1..20: mol_type = other DNA
tcgtgttgttgagagatggg

SEQ ID NO: 528 - DNA, 30 bp, synthetic construct
  misc_feature 1..30: note = Description of Artificial Sequence: Synthetic primer
  source 1..30: mol_type = other DNA
aagtgtttttcttttaatacatctagtgcc

SEQ ID NO: 529 - DNA, 21 bp, synthetic construct
  misc_feature 1..21: note = Description of Artificial Sequence: Synthetic primer
  source 1..21: mol_type = other DNA
tggttggatttcagtaggagc

SEQ ID NO: 530 - DNA, 20 bp, synthetic construct
  misc_feature 1..20: note = Description of Artificial Sequence: Synthetic primer
  source 1..20: mol_type = other DNA
acgatcatggcagattgacg

SEQ ID NO: 531 - DNA, 26 bp, synthetic construct
  misc_feature 1..26: note = Description of Artificial Sequence: Synthetic primer
  source 1..26: mol_type = other DNA
cataacgtatctaaagaggaagctcg

SEQ ID NO: 532 - DNA, 25 bp, synthetic construct
  misc_feature 1..25: note = Description of Artificial Sequence: Synthetic primer
  source 1..25: mol_type = other DNA
tgcaaagtttttggcatcatcaacc

SEQ ID NO: 533 - DNA, 22 bp, synthetic construct
  misc_feature 1..22: note = Description of Artificial Sequence: Synthetic primer
  source 1..22: mol_type = other DNA
aaagatcaaccagcagcaatcg

SEQ ID NO: 534 - DNA, 23 bp, synthetic construct
  misc_feature 1..23: note = Description of Artificial Sequence: Synthetic primer
  source 1..23: mol_type = other DNA
gtgggtttgtagtttcctgatcg

SEQ ID NO: 535 - DNA, 26 bp, synthetic construct
  misc_feature 1..26: note = Description of Artificial Sequence: Synthetic primer
  source 1..26: mol_type = other DNA
aagctatgggaaaagaatcaatgagc

SEQ ID NO: 536 - DNA, 23 bp, synthetic construct
  misc_feature 1..23: note = Description of Artificial Sequence: Synthetic primer
  source 1..23: mol_type = other DNA
gagtttgaaatgaagagcagtgg

SEQ ID NO: 537 - DNA, 24 bp, synthetic construct
  misc_feature 1..24: note = Description of Artificial Sequence: Synthetic primer
  source 1..24: mol_type = other DNA
aggctgaaaatcctttagttaagc

SEQ ID NO: 538 - DNA, 24 bp, synthetic construct
  misc_feature 1..24: note = Description of Artificial Sequence: Synthetic primer
  source 1..24: mol_type = other DNA
ggactgaatccatattgtcgaagg

SEQ ID NO: 539 - DNA, 23 bp, synthetic construct
  misc_feature 1..23: note = Description of Artificial Sequence: Synthetic primer
  source 1..23: mol_type = other DNA
tgccttcaaaaacgagaaaaagg

SEQ ID NO: 540 - DNA, 25 bp, synthetic construct
  misc_feature 1..25: note = Description of Artificial Sequence: Synthetic primer
  source 1..25: mol_type = other DNA
agtctcttgcttcatctaatatggg

SEQ ID NO: 541 - DNA, 23 bp, synthetic construct
  misc_feature 1..23: note = Description of Artificial Sequence: Synthetic primer
  source 1..23: mol_type = other DNA
tgcagtggcattgaaatatgagg

SEQ ID NO: 542 - DNA, 22 bp, synthetic construct
  misc_feature 1..22: note = Description of Artificial Sequence: Synthetic primer
  source 1..22: mol_type = other DNA
gctgaagctcatctagtgtacc

SEQ ID NO: 543 - DNA, 25 bp, synthetic construct
  misc_feature 1..25: note = Description of Artificial Sequence: Synthetic primer
  source 1..25: mol_type = other DNA
ataaatgaactggatcagctacccg

SEQ ID NO: 544 - DNA, 30 bp, synthetic construct; identical to SEQ ID NO: 510
  misc_feature 1..30: note = Description of Artificial Sequence: Synthetic primer
  source 1..30: mol_type = other DNA

SEQ ID NO: 545 - DNA, 24 bp, synthetic construct
  misc_feature 1..24: note = Description of Artificial Sequence: Synthetic primer
  source 1..24: mol_type = other DNA
tgctatatggaggaggcaaaatgg

SEQ ID NO: 546 - DNA, 24 bp, synthetic construct
  misc_feature 1..24: note = Description of Artificial Sequence: Synthetic primer
  source 1..24: mol_type = other DNA
tcgaaaaacagttcctgagacacg

SEQ ID NO: 547 - DNA, 20 bp, synthetic construct
  misc_feature 1..20: note = Description of Artificial Sequence: Synthetic primer
  source 1..20: mol_type = other DNA
tgctacatgcgtgaaaaggg

SEQ ID NO: 548 - DNA, 22 bp, synthetic construct
  misc_feature 1..22: note = Description of Artificial Sequence: Synthetic primer
  source 1..22: mol_type = other DNA
tgtggtacatctccattgctcc

SEQ ID NO: 549 - DNA, 22 bp, synthetic construct
  misc_feature 1..22: note = Description of Artificial Sequence: Synthetic primer
  source 1..22: mol_type = other DNA
tggcttttcaccaatttgctcc

SEQ ID NO: 550 - DNA, 22 bp, synthetic construct
  misc_feature 1..22: note = Description of Artificial Sequence: Synthetic primer
  source 1..22: mol_type = other DNA
aaatgggaggtccatagttggc

SEQ ID NO: 551 - DNA, 25 bp, synthetic construct
  misc_feature 1..25: note = Description of Artificial Sequence: Synthetic primer
  source 1..25: mol_type = other DNA
ttgaagaaagaagtgacaagatggc

SEQ ID NO: 552 - DNA, 21 bp, synthetic construct
  misc_feature 1..21: note = Description of Artificial Sequence: Synthetic primer
  source 1..21: mol_type = other DNA
ggcgtagaagcctaaattcgc

SEQ ID NO: 553 - DNA, 24 bp, synthetic construct
  misc_feature 1..24: note = Description of Artificial Sequence: Synthetic primer
  source 1..24: mol_type = other DNA
acatggagaaaatggagaatgagg

SEQ ID NO: 554 - DNA, 20 bp, synthetic construct
  misc_feature 1..20: note = Description of Artificial Sequence: Synthetic primer
  source 1..20: mol_type = other DNA
cgcaacctcgaaacaagtcg

SEQ ID NO: 555 - DNA, 21 bp, synthetic construct
  misc_feature 1..21: note = Description of Artificial Sequence: Synthetic primer
  source 1..21: mol_type = other DNA
aggggattgtaaacttggtgg

SEQ ID NO: 556 - DNA, 28 bp, synthetic construct
  misc_feature 1..28: note = Description of Artificial Sequence: Synthetic primer
  source 1..28: mol_type = other DNA
ttctctaaaatagctgaaattctcctcg

SEQ ID NO: 557 - DNA, 27 bp, synthetic construct
  misc_feature 1..27: note = Description of Artificial Sequence: Synthetic primer
  source 1..27: mol_type = other DNA
tgagttaccagattacatgaagatgcc

SEQ ID NO: 558 - DNA, 24 bp, synthetic construct
  misc_feature 1..24: note = Description of Artificial Sequence: Synthetic primer
  source 1..24: mol_type = other DNA
actaatacatcgaaccccatctca

SEQ ID NO: 559 - DNA, 27 bp, synthetic construct
  misc_feature 1..27: note = Description of Artificial Sequence: Synthetic primer
  source 1..27: mol_type = other DNA
acaagaagcaaaatggtattatagtgg

SEQ ID NO: 560 - DNA, 30 bp, synthetic construct
  misc_feature 1..30: note = Description of Artificial Sequence: Synthetic primer
  source 1..30: mol_type = other DNA
ttttgttataggatttgtgaaacaataagc

SEQ ID NO: 561 - DNA, 22 bp, synthetic construct
  misc_feature 1..22: note = Description of Artificial Sequence: Synthetic primer
  source 1..22: mol_type = other DNA
ataatgctaccgaagacgaagc

SEQ ID NO: 562 - DNA, 22 bp, synthetic construct
  misc_feature 1..22: note = Description of Artificial Sequence: Synthetic primer
  source 1..22: mol_type = other DNA
tctgagaaccatgtccatctcc

SEQ ID NO: 563 - DNA, 26 bp, synthetic construct
  misc_feature 1..26: note = Description of Artificial Sequence: Synthetic primer
  source 1..26: mol_type = other DNA
aatcacttttgtagatttttcacacc

SEQ ID NO: 564 - DNA, 24 bp, synthetic construct
  misc_feature 1..24: note = Description of Artificial Sequence: Synthetic primer
  source 1..24: mol_type = other DNA
gtaatcgaaagaccaaatcggagg

SEQ ID NO: 565 - DNA, 24 bp, synthetic construct
  misc_feature 1..24: note = Description of Artificial Sequence: Synthetic primer
  source 1..24: mol_type = other DNA
agaaagaagtgacaagaatgctcc

SEQ ID NO: 566 - DNA, 20 bp, synthetic construct
  misc_feature 1..20: note = Description of Artificial Sequence: Synthetic primer
  source 1..20: mol_type = other DNA
agccatgttggcgtagaagc

SEQ ID NO: 567 - DNA, 22 bp, synthetic construct
  misc_feature 1..22: note = Description of Artificial Sequence: Synthetic primer
  source 1..22: mol_type = other DNA
tgctttcaaggataagagaggg

SEQ ID NO: 568 - DNA, 24 bp, synthetic construct
  misc_feature 1..24: note = Description of Artificial Sequence: Synthetic primer
  source 1..24: mol_type = other DNA
tcttcctcattctccattttctcc

SEQ ID NO: 569 - DNA, 27 bp, synthetic construct
  misc_feature 1..27: note = Description of Artificial Sequence: Synthetic primer
  source 1..27: mol_type = other DNA
aatacatggagaaaatggagaatgagg

SEQ ID NO: 570 - DNA, 20 bp, synthetic construct
  misc_feature 1..20: note = Description of Artificial Sequence: Synthetic primer
  source 1..20: mol_type = other DNA
cgcaaactcgaacaaagtcg

SEQ ID NO: 571 - DNA, 26 bp, synthetic construct
  misc_feature 1..26: note = Description of Artificial Sequence: Synthetic primer
  source 1..26: mol_type = other DNA
tttgctagagatagattgatggaagc

SEQ ID NO: 572 - DNA, 26 bp, synthetic construct
  misc_feature 1..26: note = Description of Artificial Sequence: Synthetic primer
  source 1..26: mol_type = other DNA
aaaagctctaattcctccaaagttcc

SEQ ID NO: 573 - DNA, 27 bp, synthetic construct
  misc_feature 1..27: note = Description of Artificial Sequence: Synthetic primer
  source 1..27: mol_type = other DNA
atcaatgagttaccagattacatgaag

SEQ ID NO: 574 - DNA, 25 bp, synthetic construct
  misc_feature 1..25: note = Description of Artificial Sequence: Synthetic primer
  source 1..25: mol_type = other DNA
actaatacatcgaaccccatctcat

SEQ ID NO: 575 - DNA, 20 bp, synthetic construct
  misc_feature 1..20: note = Description of Artificial Sequence: Synthetic primer
  source 1..20: mol_type = other DNA
atacactgagttgggttggc

SEQ ID NO: 576 - DNA, 23 bp, synthetic construct
  misc_feature 1..23: note = Description of Artificial Sequence: Synthetic primer
  source 1..23: mol_type = other DNA
tgttcctaaatcatctgcaagcc

SEQ ID NO: 577 - DNA, 23 bp, synthetic construct
  misc_feature 1..23: note = Description of Artificial Sequence: Synthetic primer
  source 1..23: mol_type = other DNA
gaattgaatagaggcgacgttcc

SEQ ID NO: 578 - DNA, 27 bp, synthetic construct
  misc_feature 1..27: note = Description of Artificial Sequence: Synthetic primer
  source 1..27: mol_type = other DNA
atagtgctgttctagccatatttttgc

SEQ ID NO: 579 - DNA, 28 bp, synthetic construct
  misc_feature 1..28: note = Description of Artificial Sequence: Synthetic primer
  source 1..28: mol_type = other DNA
caatgtactgtggtcaataatagtagcc

SEQ ID NO: 580 - DNA, 22 bp, synthetic construct
  misc_feature 1..22: note = Description of Artificial Sequence: Synthetic primer
  source 1..22: mol_type = other DNA
aatcgaaagaccaaatcggagg

SEQ ID NO: 581 - DNA, 23 bp, synthetic construct
  misc_feature 1..23: note = Description of Artificial Sequence: Synthetic primer
  source 1..23: mol_type = other DNA
actgtggtcaataatagtagccc

SEQ ID NO: 582 - DNA, 26 bp, synthetic construct
  misc_feature 1..26: note = Description of Artificial Sequence: Synthetic primer
  source 1..26: mol_type = other DNA
tgaatgtaatcgaaagaccaaatcgg

SEQ ID NO: 583 - DNA, 27 bp, synthetic construct
  misc_feature 1..27: note = Description of Artificial Sequence: Synthetic primer
  source 1..27: mol_type = other DNA
aatataagggagaatcctatacaaggc

SEQ ID NO: 584 - DNA, 22 bp, synthetic construct
  misc_feature 1..22: note = Description of Artificial Sequence: Synthetic primer
  source 1..22: mol_type = other DNA
atagccatgttggcgtagaagc

SEQ ID NO: 585 - DNA, 26 bp, synthetic construct
  misc_feature 1..26: note = Description of Artificial Sequence: Synthetic primer
  source 1..26: mol_type = other DNA
tgagaaaaatggtgaaagcatattgg

SEQ ID NO: 586 - DNA, 19 bp, synthetic construct
  misc_feature 1..19: note = Description of Artificial Sequence: Synthetic primer
  source 1..19: mol_type = other DNA
tccgttcttgcagtcctcc

SEQ ID NO: 587 - DNA, 20 bp, synthetic construct
  misc_feature 1..20: note = Description of Artificial Sequence: Synthetic primer
  source 1..20: mol_type = other DNA
gaggactgcaagaacggagg

SEQ ID NO: 588 - DNA, 26 bp, synthetic construct
  misc_feature 1..26: note = Description of Artificial Sequence: Synthetic primer
  source 1..26: mol_type = other DNA
acaaatgttttagatcgtcttgatgc

SEQ ID NO: 589 - DNA, 24 bp, synthetic construct
  misc_feature 1..24: note = Description of Artificial Sequence: Synthetic primer
  source 1..24: mol_type = other DNA
tttgtgagagataggttgatgggg

SEQ ID NO: 590 - DNA, 26 bp, synthetic construct
  misc_feature 1..26: note = Description of Artificial Sequence: Synthetic primer
  source 1..26: mol_type = other DNA
aaagctctaattcttctaatgttccg

SEQ ID NO: 591 - DNA, 22 bp, synthetic construct
  misc_feature 1..22: note = Description of Artificial Sequence: Synthetic primer
  source 1..22: mol_type = other DNA
atggttggatttcagtaggagc

SEQ ID NO: 592 - DNA, 22 bp, synthetic construct
  misc_feature 1..22: note = Description of Artificial Sequence: Synthetic primer
  source 1..22: mol_type = other DNA
gtacgatcatggcagattgacg

SEQ ID NO: 593 - DNA, 28 bp, synthetic construct
  misc_feature 1..28: note = Description of Artificial Sequence: Synthetic primer
  source 1..28: mol_type = other DNA
atgcaagaccataatgtatctaaagagg

SEQ ID NO: 594 - DNA, 25 bp, synthetic construct
  misc_feature 1..25: note = Description of Artificial Sequence: Synthetic primer
  source 1..25: mol_type = other DNA
tgcaaagtttttggcatcatcaacc

SEQ ID NO: 595 - DNA, 30 bp, synthetic construct
  misc_feature 1..30: note = Description of Artificial Sequence: Synthetic primer
  source 1..30: mol_type = other DNA
tcaatgtactgtagtcgatagttctaatcc

SEQ ID NO: 596 - DNA, 25 bp, synthetic construct
  misc_feature 1..25: note = Description of Artificial Sequence: Synthetic primer
  source 1..25: mol_type = other DNA
gaccaaatggatggttcatagttgc

SEQ ID NO: 597 - DNA, 23 bp, synthetic construct
  misc_feature 1..23: note = Description of Artificial Sequence: Synthetic primer
  source 1..23: mol_type = other DNA
tagaagtcgggtgaaagagatcg

SEQ ID NO: 598 - DNA, 25 bp, synthetic construct
  misc_feature 1..25: note = Description of Artificial Sequence: Synthetic primer
  source 1..25: mol_type = other DNA
agaagtctaaattcaagagcaatgg

SEQ ID NO: 599 - DNA, 24 bp, synthetic construct
  misc_feature 1..24: note = Description of Artificial Sequence: Synthetic primer
  source 1..24: mol_type = other DNA
atagaagtcgggtgaaagagatcg

SEQ ID NO: 600 - DNA, 27 bp, synthetic construct
  misc_feature 1..27: note = Description of Artificial Sequence: Synthetic primer
  source 1..27: mol_type = other DNA
aagcgataagatactccaagtctttgc

SEQ ID NO: 601 - DNA, 22 bp, synthetic construct
  misc_feature 1..22: note = Description of Artificial Sequence: Synthetic primer
  source 1..22: mol_type = other DNA
acgagacaggaaaattcaaggc

SEQ ID NO: 602 - DNA, 20 bp, synthetic construct
  misc_feature 1..20: note = Description of Artificial Sequence: Synthetic primer
  source 1..20: mol_type = other DNA
tcctccaatgaagtgggagc

SEQ ID NO: 603 - DNA, 22 bp, synthetic construct
  misc_feature 1..22: note = Description of Artificial Sequence: Synthetic primer
  source 1..22: mol_type = other DNA
gtggaggcatactaaacttggg

SEQ ID NO: 604 - DNA, 26 bp, synthetic construct
  misc_feature 1..26: note = Description of Artificial Sequence: Synthetic primer
  source 1..26: mol_type = other DNA
aaaagctctaattcatccaatgttcc

SEQ ID NO: 605 - DNA, 22 bp, synthetic construct
  misc_feature 1..22: note = Description of Artificial Sequence: Synthetic primer
  source 1..22: mol_type = other DNA
accagaatacatgaagatgcct

SEQ ID NO: 606 - DNA, 25 bp, synthetic construct
  misc_feature 1..25: note = Description of Artificial Sequence: Synthetic primer
  source 1..25: mol_type = other DNA
tgttgatggagatgtctttgtctct

SEQ ID NO: 607 - DNA, 27 bp, synthetic construct
  misc_feature 1..27: note = Description of Artificial Sequence: Synthetic primer
  source 1..27: mol_type = other DNA
gtggatagatatgtgtagaggttttct

SEQ ID NO: 608 - DNA, 20 bp, synthetic construct
  misc_feature 1..20: note = Description of Artificial Sequence: Synthetic primer
  source 1..20: mol_type = other DNA
aagaactggtgctcccactg

SEQ ID NO: 609 - DNA, 24 bp, synthetic construct
  misc_feature 1..24: note = Description of Artificial Sequence: Synthetic primer
  source 1..24: mol_type = other DNA
tgttcggatgaaatgaaaagaggc

SEQ ID NO: 610 - DNA, 25 bp, synthetic construct
  misc_feature 1..25: note = Description of Artificial Sequence: Synthetic primer
  source 1..25: mol_type = other DNA
tgtgacgctctaccaagatttttgc

SEQ ID NO: 611 - DNA, 24 bp, synthetic construct
  misc_feature 1..24: note = Description of Artificial Sequence: Synthetic primer
  source 1..24: mol_type = other DNA
caaatgttctgtggtccataaccc

SEQ ID NO: 612 - DNA, 26 bp, synthetic construct
  misc_feature 1..26: note = Description of Artificial Sequence: Synthetic primer
  source 1..26: mol_type = other DNA
gaccaaatgggaggttcatagtttcc

SEQ ID NO: 613 - DNA, 29 bp, synthetic construct
  misc_feature 1..29: note = Description of Artificial Sequence: Synthetic primer
  source 1..29: mol_type = other DNA
gagaaagatgtgaaaatgatgctacttgg

SEQ ID NO: 614 - DNA, 25 bp, synthetic construct
  misc_feature 1..25: note = Description of Artificial Sequence: Synthetic primer
  source 1..25: mol_type = other DNA
tgaggtactacaaatccatactccc

SEQ ID NO: 615 - DNA, 25 bp, synthetic construct
  misc_feature 1..25: note = Description of Artificial Sequence: Synthetic primer
  source 1..25: mol_type = other DNA
gatgatgaaacaggagagttcaagg

SEQ ID NO: 616 - DNA, 25 bp, synthetic construct
  misc_feature 1..25: note = Description of Artificial Sequence: Synthetic primer
  source 1..25: mol_type = other DNA
gacatttggttgtgaaaattcttgc

SEQ ID NO: 617 - DNA, 22 bp, synthetic construct
  misc_feature 1..22: note = Description of Artificial Sequence: Synthetic primer
  source 1..22: mol_type = other DNA
tggatcatgctttggaaatgcc

SEQ ID NO: 618 - DNA, 24 bp, synthetic construct
  misc_feature 1..24: note = Description of Artificial Sequence: Synthetic primer
  source 1..24: mol_type = other DNA
agctcttcttgatatgttgattgc

SEQ ID NO: 619 - DNA, 23 bp, synthetic construct
  misc_feature 1..23: note = Description of Artificial Sequence: Synthetic primer
  source 1..23: mol_type = other DNA
tggtggaagcattctaaacttgg

SEQ ID NO: 620 - DNA, 25 bp, synthetic construct
  misc_feature 1..25: note = Description of Artificial Sequence: Synthetic primer
  source 1..25: mol_type = other DNA
agcattagcgaagagttgtagttcc

SEQ ID NO: 621 - DNA, 22 bp, synthetic construct
  misc_feature 1..22: note = Description of Artificial Sequence: Synthetic primer
  source 1..22: mol_type = other DNA
agtgtttcatgtggcaagttgg

SEQ ID NO: 622 - DNA, 22 bp, synthetic construct
  misc_feature 1..22: note = Description of Artificial Sequence: Synthetic primer
  source 1..22: mol_type = other DNA
agcgaagagttgtagttcctcc

SEQ ID NO: 623 - DNA, 29 bp, synthetic construct
  misc_feature 1..29: note = Description of Artificial Sequence: Synthetic primer
  source 1..29: mol_type = other DNA
gggatttgaaagtaatagatgagttaccg

SEQ ID NO: 624 - DNA, 24 bp, synthetic construct
  misc_feature 1..24: note = Description of Artificial Sequence: Synthetic primer
  source 1..24: mol_type = other DNA
agaaagccatcttcatgtaatccg

SEQ ID NO: 625 - DNA, 22 bp, synthetic construct
  misc_feature 1..22: note = Description of Artificial Sequence: Synthetic primer
  source 1..22: mol_type = other DNA
agtggataccaaccaacattgc

SEQ ID NO: 626 - DNA, 30 bp, synthetic construct
  misc_feature 1..30: note = Description of Artificial Sequence: Synthetic primer
  source 1..30: mol_type = other DNA
tgttatgagatttgtaaaacagaaataagc

SEQ ID NO: 627 - DNA, 26 bp, synthetic construct
  misc_feature 1..26: note = Description of Artificial Sequence: Synthetic primer
  source 1..26: mol_type = other DNA
gatgaaatgaaaagaggcgatgttcc

SEQ ID NO: 628 - DNA, 22 bp, synthetic construct
  misc_feature 1..22: note = Description of Artificial Sequence: Synthetic primer
  source 1..22: mol_type = other DNA
tcaaatgcttgatgtgctcacg

SEQ ID NO: 629 - DNA, 26 bp, synthetic construct
  misc_feature 1..26: note = Description of Artificial Sequence: Synthetic primer
  source 1..26: mol_type = other DNA
tggaaggagatgaataatgaaaatgg

SEQ ID NO: 630 - DNA, 28 bp, synthetic construct
  misc_feature 1..28: note = Description of Artificial Sequence: Synthetic primer
  source 1..28: mol_type = other DNA
gatcttttgatagagtattttgagaagc

SEQ ID NO: 631 - DNA, 23 bp, synthetic construct
  misc_feature 1..23: note = Description of Artificial Sequence: Synthetic primer
  source 1..23: mol_type = other DNA
tcacttagaaccacaaaagaccc

SEQ ID NO: 632 - DNA, 22 bp, synthetic construct
  misc_feature 1..22: note = Description of Artificial Sequence: Synthetic primer
  source 1..22: mol_type = other DNA
gccaacaaataagccatgttgc

SEQ ID NO: 633 - DNA, 23 bp, synthetic construct
  misc_feature 1..23: note = Description of Artificial Sequence: Synthetic primer
  source 1..23: mol_type = other DNA
acagatttagaggcagagatggg

SEQ ID NO: 634 - DNA, 21 bp, synthetic construct
  misc_feature 1..21: note = Description of Artificial Sequence: Synthetic primer
  source 1..21: mol_type = other DNA
gtggtgaaactcttggcttcc

SEQ ID NO: 635 - DNA, 20 bp, synthetic construct
  misc_feature 1..20: note = Description of Artificial Sequence: Synthetic primer
  source 1..20: mol_type = other DNA
agcttcacaccttggaatgg

SEQ ID NO: 636 - DNA, 22 bp, synthetic construct
  misc_feature 1..22: note = Description of Artificial Sequence: Synthetic primer
  source 1..22: mol_type = other DNA
atccaacttagccaactcaagc

SEQ ID NO: 637 - DNA, 20 bp, synthetic construct
  misc_feature 1..20: note = Description of Artificial Sequence: Synthetic primer
  source 1..20: mol_type = other DNA
tgcaagagatcgtgtggtgg

SEQ ID NO: 638 - DNA, 24 bp, synthetic construct
  misc_feature 1..24: note = Description of Artificial Sequence: Synthetic primer
  source 1..24: mol_type = other DNA
actgcatttgtgaaaagttcaagc

SEQ ID NO: 639 - DNA, 22 bp, synthetic construct
  misc_feature 1..22: note = Description of Artificial Sequence: Synthetic primer
  source 1..22: mol_type = other DNA
tgggacataagggcaataaggg

SEQ ID NO: 640 - DNA, 27 bp, synthetic construct
  misc_feature 1..27: note = Description of Artificial Sequence: Synthetic primer
  source 1..27: mol_type = other DNA
cgatcacttcattaccaaaattaagca

SEQ ID NO: 641 - DNA, 20 bp, synthetic construct
  misc_feature 1..20: note = Description of Artificial Sequence: Synthetic primer
  source 1..20: mol_type = other DNA
tcagttggtggtcatgcagc

SEQ ID NO: 642 - DNA, 26 bp, synthetic construct
  misc_feature 1..26: note = Description of Artificial Sequence: Synthetic primer
  source 1..26: mol_type = other DNA
tgaagttcctaaatcatcactaagcc

SEQ ID NO: 643 - DNA, 20 bp, synthetic construct
  misc_feature 1..20: note = Description of Artificial Sequence: Synthetic primer
  source 1..20: mol_type = other DNA
tcagtggagtgctacatggc

SEQ ID NO: 644 - DNA, 21 bp, synthetic construct
  misc_feature 1..21: note = Description of Artificial Sequence: Synthetic primer
  source 1..21: mol_type = other DNA
tcaccattatttttggcaggc

SEQ ID NO: 645 - DNA, 30 bp, synthetic construct
  misc_feature 1..30: note = Description of Artificial Sequence: Synthetic primer
  source 1..30: mol_type = other DNA
acaaagagagttatgtgaagattattgagc

SEQ ID NO: 646 - DNA, 24 bp, synthetic construct
  misc_feature 1..24: note = Description of Artificial Sequence: Synthetic primer
  source 1..24: mol_type = other DNA
tcaagtgtctctaaagggttttcc

SEQ ID NO: 647 - DNA, 23 bp, synthetic construct
  misc_feature 1..23: note = Description of Artificial Sequence: Synthetic primer
  source 1..23: mol_type = other DNA
acttcatggtcttcatcctttgg

SEQ ID NO: 648 - DNA, 20 bp, synthetic construct
  misc_feature 1..20: note = Description of Artificial Sequence: Synthetic primer
  source 1..20: mol_type = other DNA
ttccctaagcaaccgaaagc

SEQ ID NO: 649 - DNA, 20 bp, synthetic construct
  misc_feature 1..20: note = Description of Artificial Sequence: Synthetic primer
  source 1..20: mol_type = other DNA
gccctaatgcaccctattcg

SEQ ID NO: 650 - DNA, 28 bp, synthetic construct
  misc_feature 1..28: note = Description of Artificial Sequence: Synthetic primer
  source 1..28: mol_type = other DNA
taattctttttgatgtagttgttgaagc

SEQ ID NO: 651 - DNA, 24 bp, synthetic construct
  misc_feature 1..24: note = Description of Artificial Sequence: Synthetic primer
  source 1..24: mol_type = other DNA
tgatgaccaagttgatttctttgc

SEQ ID NO: 652 - DNA, 24 bp, synthetic construct
  misc_feature 1..24: note = Description of Artificial Sequence: Synthetic primer
  source 1..24: mol_type = other DNA
tttctaactgcttcagtaaaaggc

SEQ ID NO: 653 - DNA, 29 bp, synthetic construct
  misc_feature 1..29: note = Description of Artificial Sequence: Synthetic primer
  source 1..29: mol_type = other DNA
actagagtacatgaaagtatgttacaaga

SEQ ID NO: 654 - DNA, 21 bp, synthetic construct
  misc_feature 1..21: note = Description of Artificial Sequence: Synthetic primer
  source 1..21: mol_type = other DNA
acatagctcgcacagtatgga

SEQ ID NO: 655 - DNA, 21 bp, synthetic construct
  misc_feature 1..21: note = Description of Artificial Sequence: Synthetic primer
  source 1..21: mol_type = other DNA
aggaagcccaatggttacaca

SEQ ID NO: 656 - DNA, 25 bp, synthetic construct
  misc_feature 1..25: note = Description of Artificial Sequence: Synthetic primer
  source 1..25: mol_type = other DNA
agttcgtataatcttaggttggggt

SEQ ID NO: 657 - DNA, 19 bp, synthetic construct
  misc_feature 1..19: note = Description of Artificial Sequence: Synthetic primer
  source 1..19: mol_type = other DNA
gtagtggcttccgctgtgg

SEQ ID NO: 658 - DNA, 24 bp, synthetic construct
  misc_feature 1..24: note = Description of Artificial Sequence: Synthetic primer
  source 1..24: mol_type = other DNA
tcgccttctctatacatctcatgg

SEQ ID NO: 659 - DNA, 24 bp, synthetic construct
  misc_feature 1..24: note = Description of Artificial Sequence: Synthetic primer
  source 1..24: mol_type = other DNA
tggtcttcatcctttggaaaaccc

SEQ ID NO: 660 - DNA, 21 bp, synthetic construct
  misc_feature 1..21: note = Description of Artificial Sequence: Synthetic primer
  source 1..21: mol_type = other DNA
ttccctaagcaaccgaaagcg

SEQ ID NO: 661 - DNA, 22 bp, synthetic construct
  misc_feature 1..22: note = Description of Artificial Sequence: Synthetic primer
  source 1..22: mol_type = other DNA
gtgaaacatgccctaatgcacc

SEQ ID NO: 662 - DNA, 25 bp, synthetic construct
  misc_feature 1..25: note = Description of Artificial Sequence: Synthetic primer
  source 1..25: mol_type = other DNA
atctagtttggcagttaaaagaagc

SEQ ID NO: 663 - DNA, 26 bp, synthetic construct
  misc_feature 1..26: note = Description of Artificial Sequence: Synthetic primer
  source 1..26: mol_type = other DNA
acagaatagtggagtgttacatttgg

SEQ ID NO: 664 - DNA, 28 bp, synthetic construct
  misc_feature 1..28: note = Description of Artificial Sequence: Synthetic primer
  source 1..28: mol_type = other DNA
ataatagtaagcaaagaaatcaacttgg

SEQ ID NO: 665 - DNA, 23 bp, synthetic construct
  misc_feature 1..23: note = Description of Artificial Sequence: Synthetic primer
  source 1..23: mol_type = other DNA
ttcaaaactcccaaaaagcgaaa

SEQ ID NO: 666 - DNA, 21 bp, synthetic construct
  misc_feature 1..21: note = Description of Artificial Sequence: Synthetic primer
  source 1..21: mol_type = other DNA
tgtcacgtcagcatacactcc

SEQ ID NO: 667 - DNA, 23 bp, synthetic construct
  misc_feature 1..23: note = Description of Artificial Sequence: Synthetic primer
  source 1..23: mol_type = other DNA
tcaaaagatgtagtggcttctgc

SEQ ID NO: 668 - DNA, 24 bp, synthetic construct
  misc_feature 1..24: note = Description of Artificial Sequence: Synthetic primer
  source 1..24: mol_type = other DNA
attaagagtggtctaggaatagcg

SEQ ID NO: 669 - DNA, 26 bp, synthetic construct
  misc_feature 1..26: note = Description of Artificial Sequence: Synthetic primer
  source 1..26: mol_type = other DNA
caatatggtgtaacagatgaagaagc

SEQ ID NO: 670 - DNA, 26 bp, synthetic construct
  misc_feature 1..26: note = Description of Artificial Sequence: Synthetic primer
  source 1..26: mol_type = other DNA
tgagagtatcaatcaaattcttgagc

SEQ ID NO: 671 - DNA, 23 bp, synthetic construct
  misc_feature 1..23: note = Description of Artificial Sequence: Synthetic primer
  source 1..23: mol_type = other DNA
catcgagacaaactgcgaatact

SEQ ID NO: 672 - DNA, 27 bp, synthetic construct
  misc_feature 1..27: note = Description of Artificial Sequence: Synthetic primer
  source 1..27: mol_type = other DNA
atatgtgatctccattttcttccattg

SEQ ID NO: 673 - DNA, 19 bp, synthetic construct
  misc_feature 1..19: note = Description of Artificial Sequence: Synthetic primer
  source 1..19: mol_type = other DNA
catggatggcccgattgga

SEQ ID NO: 674 - DNA, 25 bp, synthetic construct
  misc_feature 1..25: note = Description of Artificial Sequence: Synthetic primer
  source 1..25: mol_type = other DNA
tcgaaaatgattctttccaagccat

SEQ ID NO: 675 - DNA, 23 bp, synthetic construct
  misc_feature 1..23: note = Description of Artificial Sequence: Synthetic primer
  source 1..23: mol_type = other DNA
gattggggacttagtgaaatggg

SEQ ID NO: 676 - DNA, 28 bp, synthetic construct
  misc_feature 1..28: note = Description of Artificial Sequence: Synthetic primer
  source 1..28: mol_type = other DNA
gtaaagttttctaactcggtgattaagg

SEQ ID NO: 677 - DNA, 21 bp, synthetic construct
  misc_feature 1..21: note = Description of Artificial Sequence: Synthetic primer
  source 1..21: mol_type = other DNA
ggtgggatggtgaaggattga

SEQ ID NO: 678 - DNA, 24 bp, synthetic construct
  misc_feature 1..24: note = Description of Artificial Sequence: Synthetic primer
  source 1..24: mol_type = other DNA
tgatgtcacttgtttcttgttgat

SEQ ID NO: 679 - DNA, 21 bp, synthetic construct
  misc_feature 1..21: note = Description of Artificial Sequence: Synthetic primer
  source 1..21: mol_type = other DNA
tcacaccttgcttcttccagc

SEQ ID NO: 680 - DNA, 30 bp, synthetic construct
  misc_feature 1..30: note = Description of Artificial Sequence: Synthetic primer
  source 1..30: mol_type = other DNA
tcattcaacaaacgacaaataatcataacc

SEQ ID NO: 681 - DNA, 21 bp, synthetic construct
  misc_feature 1..21: note = Description of Artificial Sequence: Synthetic primer
  source 1..21: mol_type = other DNA
acttgaagaacaatcccgagg

SEQ ID NO: 682 - DNA, 22 bp, synthetic construct
  misc_feature 1..22: note = Description of Artificial Sequence: Synthetic primer
  source 1..22: mol_type = other DNA
aaccctaacatcatcatcgtcg

SEQ ID NO: 683 - DNA, 21 bp, synthetic construct
  misc_feature 1..21: note = Description of Artificial Sequence: Synthetic primer
  source 1..21: mol_type = other DNA
cagacactgaaatgcttgacg

SEQ ID NO: 684 - DNA, 22 bp, synthetic construct
  misc_feature 1..22: note = Description of Artificial Sequence: Synthetic primer
  source 1..22: mol_type = other DNA
tagcggttagacatttagaggg

SEQ ID NO: 685 - DNA, 23 bp, synthetic construct
  misc_feature 1..23: note = Description of Artificial Sequence: Synthetic primer
  source 1..23: mol_type = other DNA
caaccctctaaatgtctaaccgc

SEQ ID NO: 686 - DNA, 26 bp, synthetic construct
  misc_feature 1..26: note = Description of Artificial Sequence: Synthetic primer
  source 1..26: mol_type = other DNA
aaattgagttttgaaggcatagtagg

SEQ ID NO: 687 - DNA, 20 bp, synthetic construct
  misc_feature 1..20: note = Description of Artificial Sequence: Synthetic primer
  source 1..20: mol_type = other DNA
atctttgccccaaactcagg

SEQ ID NO: 688 - DNA, 22 bp, synthetic construct
  misc_feature 1..22: note = Description of Artificial Sequence: Synthetic primer
  source 1..22: mol_type = other DNA
ggttaggatgtggtatcatggc

SEQ ID NO: 689 - DNA, 23 bp, synthetic construct
  misc_feature 1..23: note = Description of Artificial Sequence: Synthetic primer
  source 1..23: mol_type = other DNA
taccacatcctaaccaaccttcg

SEQ ID NO: 690 - DNA, 21 bp, synthetic construct
  misc_feature 1..21: note = Description of Artificial Sequence: Synthetic primer
  source 1..21: mol_type = other DNA
caacaacacaagccagagtgg

SEQ ID NO: 691 - DNA, 26 bp, synthetic construct
  misc_feature 1..26: note = Description of Artificial Sequence: Synthetic primer
  source 1..26: mol_type = other DNA
tattcattcatctaatgcaaaaaggc

SEQ ID NO: 692 - DNA, 22 bp, synthetic construct
  misc_feature 1..22: note = Description of Artificial Sequence: Synthetic primer
  source 1..22: mol_type = other DNA
aatatgtccgaaacgaaaacgg

SEQ ID NO: 693 - DNA, 25 bp, synthetic construct
  misc_feature 1..25: note = Description of Artificial Sequence: Synthetic primer
  source 1..25: mol_type = other DNA
tgttatcatatcttgaagtgttgcc

SEQ ID NO: 694 - DNA, 20 bp, synthetic construct
  misc_feature 1..20: note = Description of Artificial Sequence: Synthetic primer
  source 1..20: mol_type = other DNA
ctgttgccgatggagattgg

SEQ ID NO: 695 - DNA, 20 bp, synthetic construct
  misc_feature 1..20: note = Description of Artificial Sequence: Synthetic primer
  source 1..20: mol_type = other DNA
caatctccatcggcaacagc

SEQ ID NO: 696 - DNA, 29 bp, synthetic construct
  misc_feature 1..29: note = Description of Artificial Sequence: Synthetic primer
  source 1..29: mol_type = other DNA
tgttattattggaaaacttgtgaactagg

SEQ ID NO: 697 - DNA, 21 bp, synthetic construct
  misc_feature 1..21: note = Description of Artificial Sequence: Synthetic primer
  source 1..21: mol_type = other DNA
agggttagctgagcatttcgc

SEQ ID NO: 698 - DNA, 24 bp, synthetic construct
  misc_feature 1..24: note = Description of Artificial Sequence: Synthetic primer
  source 1..24: mol_type = other DNA
ctaggaaaaactttgtagccatgc

SEQ ID NO: 699 - DNA, 23 bp, synthetic construct
  misc_feature 1..23: note = Description of Artificial Sequence: Synthetic primer
  source 1..23: mol_type = other DNA
actatgaatgcttttcggttacg

SEQ ID NO: 700 - DNA, 28 bp, synthetic construct
  misc_feature 1..28: note = Description of Artificial Sequence: Synthetic primer
  source 1..28: mol_type = other DNA
aaaatagacttttgaagtagttttctcg

SEQ ID NO: 701 - DNA, 24 bp, synthetic construct
  misc_feature 1..24: note = Description of Artificial Sequence: Synthetic primer
  source 1..24: mol_type = other DNA
ttgcttttcatggtgaatttgagc

SEQ ID NO: 702 - DNA, 27 bp, synthetic construct
  misc_feature 1..27: note = Description of Artificial Sequence: Synthetic primer
  source 1..27: mol_type = other DNA
tttgttaaaaggatttgtatgtggagc

SEQ ID NO: 703 - DNA, 21 bp, synthetic construct
  misc_feature 1..21: note = Description of Artificial Sequence: Synthetic primer
  source 1..21: mol_type = other DNA
tggctcgactagatcacttgg

SEQ ID NO: 704 - DNA, 22 bp, synthetic construct
  misc_feature 1..22: note = Description of Artificial Sequence: Synthetic primer
  source 1..22: mol_type = other DNA
gtgaaacctcgacaacctttgg

SEQ ID NO: 705 - DNA, 25 bp, synthetic construct
  misc_feature 1..25: note = Description of Artificial Sequence: Synthetic primer
  source 1..25: mol_type = other DNA
ggggacttaatgaaatgggatttgg

SEQ ID NO: 706 - DNA, 23 bp, synthetic construct
  misc_feature 1..23: note = Description of Artificial Sequence: Synthetic primer
  source 1..23: mol_type = other DNA
tcataaggcaaagaacaacaagc

SEQ ID NO: 707 - DNA, 21 bp, synthetic construct
  misc_feature 1..21: note = Description of Artificial Sequence: Synthetic primer
  source 1..21: mol_type = other DNA
ccatagcaactcacaccttgc

SEQ ID NO: 708 - DNA, 23 bp, synthetic construct
  misc_feature 1..23: note = Description of Artificial Sequence: Synthetic primer
  source 1..23: mol_type = other DNA
acactctcacattgaattggtcg

SEQ ID NO: 709 - DNA, 25 bp, synthetic construct
  misc_feature 1..25: note = Description of Artificial Sequence: Synthetic primer
  source 1..25: mol_type = other DNA
cttgcttttcatggtgaatttgagc

SEQ ID NO: 710 - DNA, 30 bp, synthetic construct
  misc_feature 1..30: note = Description of Artificial Sequence: Synthetic primer
  source 1..30: mol_type = other DNA
cagtttcttaaagggatttgtatgttgagc

SEQ ID NO: 711 - DNA, 20 bp, synthetic construct
  misc_feature 1..20: note = Description of Artificial Sequence: Synthetic primer
  source 1..20: mol_type = other DNA
gatggctcgactagatcacc

SEQ ID NO: 712 - DNA, 24 bp, synthetic construct
  misc_feature 1..24: note = Description of Artificial Sequence: Synthetic primer
  source 1..24: mol_type = other DNA
agatgtctttcccatccataaagc

SEQ ID NO: 713 - DNA, 24 bp, synthetic construct
  misc_feature 1..24: note = Description of Artificial Sequence: Synthetic primer
  source 1..24: mol_type = other DNA
agaatggggacttagtgaaatggg

SEQ ID NO: 714 - DNA, 26 bp, synthetic construct
  misc_feature 1..26: note = Description of Artificial Sequence: Synthetic primer
  source 1..26: mol_type = other DNA
tggagaatcataaggcaaataacagc

SEQ ID NO: 715 - DNA, 24 bp, synthetic construct
  misc_feature 1..24: note = Description of Artificial Sequence: Synthetic primer
  source 1..24: mol_type = other DNA
tggaataatgaagggttgagtggt

SEQ ID NO: 716 - DNA, 25 bp, synthetic construct
  misc_feature 1..25: note = Description of Artificial Sequence: Synthetic primer
  source 1..25: mol_type = other DNA
tcttatgtagctggttatgtcttca

SEQ ID NO: 717 - DNA, 24 bp, synthetic construct
  misc_feature 1..24: note = Description of Artificial Sequence: Synthetic primer
  source 1..24: mol_type = other DNA
tgaatctgagtggagtaaaagtgg

SEQ ID NO: 718 - DNA, 24 bp, synthetic construct
  misc_feature 1..24: note = Description of Artificial Sequence: Synthetic primer
  source 1..24: mol_type = other DNA
agaagaaatgaagctggaagaagc

SEQ ID NO: 719 - DNA, 23 bp, synthetic construct
  misc_feature 1..23: note = Description of Artificial Sequence: Synthetic primer
  source 1..23: mol_type = other DNA
gcaactcataccttgcttcttcc

SEQ ID NO: 720 - DNA, 26 bp, synthetic construct
  misc_feature 1..26: note = Description of Artificial Sequence: Synthetic primer
  source 1..26: mol_type = other DNA
gaactttgtaagtcattcaacaaacg

SEQ ID NO: 721 - DNA, 24 bp, synthetic construct
  misc_feature 1..24: note = Description of Artificial Sequence: Synthetic primer
  source 1..24: mol_type = other DNA
gagggaaagagaagaaggcaaacc

SEQ ID NO: 722 - DNA, 28 bp, synthetic construct
  misc_feature 1..28: note = Description of Artificial Sequence: Synthetic primer
  source 1..28: mol_type = other DNA
acttttaagcaagataagtgtagaagcc

SEQ ID NO: 723 - DNA, 26 bp, synthetic construct
  misc_feature 1..26: note = Description of Artificial Sequence: Synthetic primer
  source 1..26: mol_type = other DNA
aatgacaatggttttaccaatcttcc

SEQ ID NO: 724 - DNA, 25 bp, synthetic construct
  misc_feature 1..25: note = Description of Artificial Sequence: Synthetic primer
  source 1..25: mol_type = other DNA
aatcgctttgttaatgtcttcaagc

SEQ ID NO: 725 - DNA, 21 bp, synthetic construct
  misc_feature 1..21: note = Description of Artificial Sequence: Synthetic primer
  source 1..21: mol_type = other DNA
tcggccaattttcatcctagt

SEQ ID NO: 726 - DNA, 26 bp, synthetic construct
  misc_feature 1..26: note = Description of Artificial Sequence: Synthetic primer
  source 1..26: mol_type = other DNA
ggtatatttgagaaagtgatctcccc

SEQ ID NO: 727 - DNA, 19 bp, synthetic construct
  misc_feature 1..19: note = Description of Artificial Sequence: Synthetic primer
  source 1..19: mol_type = other DNA
ggatgctaactgctgcccc

SEQ ID NO: 728 - DNA, 21 bp, synthetic construct
  misc_feature 1..21: note = Description of Artificial Sequence: Synthetic primer
  source 1..21: mol_type = other DNA
aaagggagaccgtatgaaggg

SEQ ID NO: 729 - DNA, 22 bp, synthetic construct
  misc_feature 1..22: note = Description of Artificial Sequence: Synthetic primer
  source 1..22: mol_type = other DNA
gaaatcccagttgaccatgagc

SEQ ID NO: 730 - DNA, 20 bp, synthetic construct
  misc_feature 1..20: note = Description of Artificial Sequence: Synthetic primer
  source 1..20: mol_type = other DNA
gatgactgtggttagggtcg

SEQ ID NO: 731 - DNA, 21 bp, synthetic construct
  misc_feature 1..21: note = Description of Artificial Sequence: Synthetic primer
  source 1..21: mol_type = other DNA
cacaactcatttggtggaggc

SEQ ID NO: 732 - DNA, 21 bp, synthetic construct
  misc_feature 1..21: note = Description of Artificial Sequence: Synthetic primer
  source 1..21: mol_type = other DNA
agatgactgtggttagggtcg

SEQ ID NO: 733 - DNA, 23 bp, synthetic construct
  misc_feature 1..23: note = Description of Artificial Sequence: Synthetic primer
  source 1..23: mol_type = other DNA
ggaaagacttggactttgcatcg

SEQ ID NO: 734 - DNA, 21 bp, synthetic construct
  misc_feature 1..21: note = Description of Artificial Sequence: Synthetic primer
  source 1..21: mol_type = other DNA
ctagcagcactgtactttggc

SEQ ID NO: 735 - DNA, 23 bp, synthetic construct
  misc_feature 1..23: note = Description of Artificial Sequence: Synthetic primer
  source 1..23: mol_type = other DNA
ggaaagacttggactttgcatcg

SEQ ID NO: 736 - DNA, 20 bp, synthetic construct
  misc_feature 1..20: note = Description of Artificial Sequence: Synthetic primer
  source 1..20: mol_type = other DNA
ttgcgtctgtgaagagttcc

SEQ ID NO: 737 - DNA, 28 bp, synthetic construct
  misc_feature 1..28: note = Description of Artificial Sequence: Synthetic primer
  source 1..28: mol_type = other DNA
tatacgatgaaattgaggaggagttggc

SEQ ID NO: 738 - DNA, 22 bp, synthetic construct
  misc_feature 1..22: note = Description of Artificial Sequence: Synthetic primer
  source 1..22: mol_type = other DNA
aggccatccgataagttctgcc

SEQ ID NO: 739 - DNA, 21 bp, synthetic construct
  misc_feature 1..21: note = Description of Artificial Sequence: Synthetic primer
  source 1..21: mol_type = other DNA
tactacgtggaagctcaatgg

SEQ ID NO: 740 - DNA, 21 bp, synthetic construct
  misc_feature 1..21: note = Description of Artificial Sequence: Synthetic primer
  source 1..21: mol_type = other DNA
aagccaatgaaagacctcagc

SEQ ID NO: 741 - DNA, 20 bp, synthetic construct
  misc_feature 1..20: note = Description of Artificial Sequence: Synthetic primer
  source 1..20: mol_type = other DNA
actacatgctcactgccacg

SEQ ID NO: 742 - DNA, 21 bp, synthetic construct
  misc_feature 1..21: note = Description of Artificial Sequence: Synthetic primer
  source 1..21: mol_type = other DNA
tctgcaaactactgctgatgc

SEQ ID NO: 743 - DNA, 23 bp, synthetic construct
  misc_feature 1..23: note = Description of Artificial Sequence: Synthetic primer
  source 1..23: mol_type = other DNA
gtttgagcaagatagaggacacg

SEQ ID NO: 744 - DNA, 20 bp, synthetic construct
  misc_feature 1..20: note = Description of Artificial Sequence: Synthetic primer
  source 1..20: mol_type = other DNA
gcatgaggacagacatgggc

SEQ ID NO: 745 - DNA, 21 bp, synthetic construct
  misc_feature 1..21: note = Description of Artificial Sequence: Synthetic primer
  source 1..21: mol_type = other DNA
tgaatgaggagtgcatggagc

SEQ ID NO: 746 - DNA, 19 bp, synthetic construct
  misc_feature 1..19: note = Description of Artificial Sequence: Synthetic primer
  source 1..19: mol_type = other DNA
tccggcatgggtgtaaccg

SEQ ID NO: 747 - DNA, 24 bp, synthetic construct
  misc_feature 1..24: note = Description of Artificial Sequence: Synthetic primer
  source 1..24: mol_type = other DNA
agcctcatcacaaaatgacaaagt

SEQ ID NO: 748 - DNA, 24 bp, synthetic construct
  misc_feature 1..24: note = Description of Artificial Sequence: Synthetic primer
  source 1..24: mol_type = other DNA
ggttgataagttgttgttggacga

SEQ ID NO: 749 - DNA, 22 bp, synthetic construct
  misc_feature 1..22: note = Description of Artificial Sequence: Synthetic primer
  source 1..22: mol_type = other DNA
aaggaagtggtaaggagagagg

SEQ ID NO: 750 - DNA, 23 bp, synthetic construct
  misc_feature 1..23: note = Description of Artificial Sequence: Synthetic primer
  source 1..23: mol_type = other DNA
gaaaccataaatccatgttggcg

SEQ ID NO: 751 - DNA, 23 bp, synthetic construct
  misc_feature 1..23: note = Description of Artificial Sequence: Synthetic primer
  source 1..23: mol_type = other DNA
agcaagggaattttaaggagtgc

SEQ ID NO: 752 - DNA, 20 bp, synthetic construct
  misc_feature 1..20: note = Description of Artificial Sequence: Synthetic primer
  source 1..20: mol_type = other DNA
aggtgagtggtggtgaaagc

SEQ ID NO: 753 - DNA, 21 bp, synthetic construct
  misc_feature 1..21: note = Description of Artificial Sequence: Synthetic primer
  source 1..21: mol_type = other DNA
ttgctttcaccaccactcacc

SEQ ID NO: 754 - DNA, 21 bp, synthetic construct
  misc_feature 1..21: note = Description of Artificial Sequence: Synthetic primer
  source 1..21: mol_type = other DNA
gaaatgtaatgcctggcgtgg

SEQ ID NO: 755 - DNA, 23 bp, synthetic construct
  misc_feature 1..23: note = Description of Artificial Sequence: Synthetic primer
  source 1..23: mol_type = other DNA
tgcaagagataggattgtggagc

SEQ ID NO: 756 - DNA, 20 bp, synthetic construct
  misc_feature 1..20: note = Description of Artificial Sequence: Synthetic primer
  source 1..20: mol_type = other DNA
tctgcaactgaggccaatgc

SEQ ID NO: 757 - DNA, 21 bp, synthetic construct
  misc_feature 1..21: note = Description of Artificial Sequence: Synthetic primer
  source 1..21: mol_type = other DNA
tgaacctgaattgtcactggc

SEQ ID NO: 758 - DNA, 22 bp, synthetic construct
  misc_feature 1..22: note = Description of Artificial Sequence: Synthetic primer
  source 1..22: mol_type = other DNA
gctcaagctcttcaaatgtacc

SEQ ID NO: 759 - DNA, 20 bp, synthetic construct
  misc_feature 1..20: note = Description of Artificial Sequence: Synthetic primer
  source 1..20: mol_type = other DNA
aattgtgcggatcaacttcg

SEQ ID NO: 760 - DNA, 23 bp, synthetic construct
  misc_feature 1..23: note = Description of Artificial Sequence: Synthetic primer
  source 1..23: mol_type = other DNA
tgtaactttcctcctttccaagc

SEQ ID NO: 761 - DNA, 24 bp, synthetic construct
  misc_feature 1..24: note = Description of Artificial Sequence: Synthetic primer
  source 1..24: mol_type = other DNA
agcgatgaaaagattacttggagc

SEQ ID NO: 762 - DNA, 27 bp, synthetic construct
  misc_feature 1..27: note = Description of Artificial Sequence: Synthetic primer
  source 1..27: mol_type = other DNA
catccatgaacctacaaaggatattgc

SEQ ID NO: 763 - DNA, 22 bp, synthetic construct
  misc_feature 1..22: note = Description of Artificial Sequence: Synthetic primer
  source 1..22: mol_type = other DNA
agagatcattcaccgtctaccg

SEQ ID NO: 764 - DNA, 26 bp, synthetic construct
  misc_feature 1..26: note = Description of Artificial Sequence: Synthetic primer
  source 1..26: mol_type = other DNA
aaactggataaggcacattagaaggc

SEQ ID NO: 765 - DNA, 22 bp, synthetic construct
  misc_feature 1..22: note = Description of Artificial Sequence: Synthetic primer
  source 1..22: mol_type = other DNA
ggccttctaatgtgccttatcc

SEQ ID NO: 766 - DNA, 27 bp, synthetic construct
  misc_feature 1..27: note = Description of Artificial Sequence: Synthetic primer
  source 1..27: mol_type = other DNA
tcatgggatttgatctataagtaacgc

SEQ ID NO: 767 - DNA, 26 bp, synthetic construct
  misc_feature 1..26: note = Description of Artificial Sequence: Synthetic primer
  source 1..26: mol_type = other DNA
agttttagcctcatcacaaaatgaca

SEQ ID NO: 768 - DNA, 24 bp, synthetic construct
  misc_feature 1..24: note = Description of Artificial Sequence: Synthetic primer
  source 1..24: mol_type = other DNA
gttgataagttgttgttggacgaa

SEQ ID NO: 769 - DNA, 24 bp, synthetic construct
  misc_feature 1..24: note = Description of Artificial Sequence: Synthetic primer
  source 1..24: mol_type = other DNA
tagcctcatcacaaaatgacaaag

SEQ ID NO: 770 - DNA, 24 bp, synthetic construct
  misc_feature 1..24: note = Description of Artificial Sequence: Synthetic primer
  source 1..24: mol_type = other DNA
cccccaaatagaaggttgataagt

SEQ ID NO: 771 - DNA, 20 bp, synthetic construct
  misc_feature 1..20: note = Description of Artificial Sequence: Synthetic primer
  source 1..20: mol_type = other DNA
taaaaagcagcgagttgacg

SEQ ID NO: 772 - DNA, 22 bp, synthetic construct
  misc_feature 1..22: note = Description of Artificial Sequence: Synthetic primer
  source 1..22: mol_type = other DNA
aatgatacgacaatcccaaacg

SEQ ID NO: 773 - DNA, 22 bp, synthetic construct
  misc_feature 1..22: note = Description of Artificial Sequence: Synthetic primer
  source 1..22: mol_type = other DNA
aaggaagtggtaaggagagagg

SEQ ID NO: 774 - DNA, 23 bp, synthetic construct
  misc_feature 1..23: note = Description of Artificial Sequence: Synthetic primer
  source 1..23: mol_type = other DNA
gaaaccataaatccatgttggcg

SEQ ID NO: 775 - DNA, 23 bp, synthetic construct
  misc_feature 1..23: note = Description of Artificial Sequence: Synthetic primer
  source 1..23: mol_type = other DNA
agcaagggaattttaaggagtgc

SEQ ID NO: 776 - DNA, 20 bp, synthetic construct
  misc_feature 1..20: note = Description of Artificial Sequence: Synthetic primer
  source 1..20: mol_type = other DNA
aggtgagtggtggtgaaagc

SEQ ID NO: 777 - DNA, 22 bp, synthetic construct
  misc_feature 1..22: note = Description of Artificial Sequence: Synthetic primer
  source 1..22: mol_type = other DNA
cttgctttcaccaccactcacc

SEQ ID NO: 778 - DNA, 19 bp, synthetic construct
  misc_feature 1..19: note = Description of Artificial Sequence: Synthetic primer
  source 1..19: mol_type = other DNA
gtaatgcctggcgtggagc

SEQ ID NO: 779 - DNA, 22 bp, synthetic construct
  misc_feature 1..22: note = Description of Artificial Sequence: Synthetic primer
  source 1..22: mol_type = other DNA
gcaagagataggattgtggagc

SEQ ID NO: 780 - DNA, 20 bp, synthetic construct
  misc_feature 1..20: note = Description of Artificial Sequence: Synthetic primer
  source 1..20: mol_type = other DNA
atctgcaactgaggccaagg

SEQ ID NO: 781 - DNA, 21 bp, synthetic construct
  misc_feature 1..21: note = Description of Artificial Sequence: Synthetic primer
  source 1..21: mol_type = other DNA
tgaacctgaattgtcactggc

SEQ ID NO: 782 - DNA, 22 bp, synthetic construct
  misc_feature 1..22: note = Description of Artificial Sequence: Synthetic primer
  source 1..22: mol_type = other DNA
gctcaagctcttcaaatgtacc

SEQ ID NO: 783 - DNA, 20 bp, synthetic construct
  misc_feature 1..20: note = Description of Artificial Sequence: Synthetic primer
  source 1..20: mol_type = other DNA
aattgtgcggatcaacttcg

SEQ ID NO: 784 - DNA, 23 bp, synthetic construct
  misc_feature 1..23: note = Description of Artificial Sequence: Synthetic primer
  source 1..23: mol_type = other DNA
tgtaactttcctcctttccaagc

SEQ ID NO: 785 - DNA, 20 bp, synthetic construct
  misc_feature 1..20: note = Description of Artificial Sequence: Synthetic primer
  source 1..20: mol_type = other DNA
cagtgaagctcgatggttgc

SEQ ID NO: 786 - DNA, 25 bp, synthetic construct
  misc_feature 1..25: note = Description of Artificial Sequence: Synthetic primer
  source 1..25: mol_type = other DNA
tccatgaacctacaaaggatattgc

SEQ ID NO: 787 - DNA, 21 bp, synthetic construct
  misc_feature 1..21: note = Description of Artificial Sequence: Synthetic primer
  source 1..21: mol_type = other DNA
ccgttgagagttacatgaggc

SEQ ID NO: 788 - DNA, 23 bp, synthetic construct
  misc_feature 1..23: note = Description of Artificial Sequence: Synthetic primer
  source 1..23: mol_type = other DNA
actggataaggcacattagaagg

SEQ ID NO: 789 - DNA, 20 bp, synthetic construct
  misc_feature 1..20: note = Description of Artificial Sequence: Synthetic primer
  source 1..20: mol_type = other DNA
acaagaggcatgtgatgagc

SEQ ID NO: 790 - DNA, 26 bp, synthetic construct
  misc_feature 1..26: note = Description of Artificial Sequence: Synthetic primer
  source 1..26: mol_type = other DNA
gggatttgatctataagtaacgcagc

SEQ ID NO: 791 - DNA, 23 bp, synthetic construct
  misc_feature 1..23: note = Description of Artificial Sequence: Synthetic primer
  source 1..23: mol_type = other DNA
tgtcgtctcaaatcttagcaacc

SEQ ID NO: 792 - DNA, 20 bp, synthetic construct
  misc_feature 1..20: note = Description of Artificial Sequence: Synthetic primer
  source 1..20: mol_type = other DNA
atgcaaaaatcggtctcccc

SEQ ID NO: 793 - DNA, 26 bp, synthetic construct
  misc_feature 1..26: note = Description of Artificial Sequence: Synthetic primer
  source 1..26: mol_type = other DNA
ttcttatgtgatgattggagtaatcg

SEQ ID NO: 794 - DNA, 28 bp, synthetic construct
  misc_feature 1..28: note = Description of Artificial Sequence: Synthetic primer
  source 1..28: mol_type = other DNA
gcttattttgttgtaaatgtgttgaagc

SEQ ID NO: 795 - DNA, 25 bp, synthetic construct
  misc_feature 1..25: note = Description of Artificial Sequence: Synthetic primer
  source 1..25: mol_type = other DNA
cgattgaagttaattgatgtggtgc

SEQ ID NO: 796 - DNA, 26 bp, synthetic construct
  misc_feature 1..26: note = Description of Artificial Sequence: Synthetic primer
  source 1..26: mol_type = other DNA
aaagaaaccctatatccatgttgtcg

SEQ ID NO: 797 - DNA, 21 bp, synthetic construct
  misc_feature 1..21: note = Description of Artificial Sequence: Synthetic primer
  source 1..21: mol_type = other DNA
gaatgtttggcgagtgacacc

SEQ ID NO: 798 - DNA, 20 bp, synthetic construct
  misc_feature 1..20: note = Description of Artificial Sequence: Synthetic primer
  source 1..20: mol_type = other DNA
aagggcctctctagggctcg

SEQ ID NO: 799 - DNA, 22 bp, synthetic construct
  misc_feature 1..22: note = Description of Artificial Sequence: Synthetic primer
  source 1..22: mol_type = other DNA
aagaacaccccaatgatgatcc

SEQ ID NO: 800 - DNA, 23 bp, synthetic construct
  misc_feature 1..23: note = Description of Artificial Sequence: Synthetic primer
  source 1..23: mol_type = other DNA
actaagctcctttttgtgcatgg

SEQ ID NO: 801 - DNA, 22 bp, synthetic construct
  misc_feature 1..22: note = Description of Artificial Sequence: Synthetic primer
  source 1..22: mol_type = other DNA
ggtggaaggaattagacagtgc

SEQ ID NO: 802 - DNA, 20 bp, synthetic construct
  misc_feature 1..20: note = Description of Artificial Sequence: Synthetic primer
  source 1..20: mol_type = other DNA
tcagcgattgaggaaagtgc

SEQ ID NO: 803 - DNA, 27 bp, synthetic construct
  misc_feature 1..27: note = Description of Artificial Sequence: Synthetic primer
  source 1..27: mol_type = other DNA
gggacaaaaattgtatggataaactcc

SEQ ID NO: 804 - DNA, 27 bp, synthetic construct
  misc_feature 1..27: note = Description of Artificial Sequence: Synthetic primer
  source 1..27: mol_type = other DNA
tccttttcaaactcttgttcaaattcc

SEQ ID NO: 805 - DNA, 21 bp, synthetic construct
  misc_feature 1..21: note = Description of Artificial Sequence: Synthetic primer
  source 1..21: mol_type = other DNA
agctcgatggttgaatgaagg

SEQ ID NO: 806 - DNA, 20 bp, synthetic construct
  misc_feature 1..20: note = Description of Artificial Sequence: Synthetic primer
  source 1..20: mol_type = other DNA
ggtctttggagagccactcg

SEQ ID NO: 807 - DNA, 22 bp, synthetic construct
  misc_feature 1..22: note = Description of Artificial Sequence: Synthetic primer
  source 1..22: mol_type = other DNA
tgatggcttgctctttagttgg

SEQ ID NO: 808 - DNA, 20 bp, synthetic construct
  misc_feature 1..20: note = Description of Artificial Sequence: Synthetic primer
  source 1..20: mol_type = other DNA
agccacgtcatccatgtacc

SEQ ID NO: 809 - DNA, 28 bp, synthetic construct
  misc_feature 1..28: note = Description of Artificial Sequence: Synthetic primer
  source 1..28: mol_type = other DNA
agaatgagcaagagagaaatcatatacc

SEQ ID NO: 810 - DNA, 20 bp, synthetic construct
  misc_feature 1..20: note = Description of Artificial Sequence: Synthetic primer
  source 1..20: mol_type = other DNA
ccatgcaataaccactcgcc

SEQ ID NO: 811 - DNA, 21 bp, synthetic construct
  misc_feature 1..21: note = Description of Artificial Sequence: Synthetic primer
  source 1..21: mol_type = other DNA
tctcaaaccaactgaagcagc

SEQ ID NO: 812 - DNA, 22 bp, synthetic construct
  misc_feature 1..22: note = Description of Artificial Sequence: Synthetic primer
  source 1..22: mol_type = other DNA
ttggatcaatgagcaagacagc

SEQ ID NO: 813 - DNA, 23 bp, synthetic construct
  misc_feature 1..23: note = Description of Artificial Sequence: Synthetic primer
  source 1..23: mol_type = other DNA
ggtcttcatcctttggaaaatcc

SEQ ID NO: 814 - DNA, 21 bp, synthetic construct
  misc_feature 1..21: note = Description of Artificial Sequence: Synthetic primer
  source 1..21: mol_type = other DNA
aagcaaccgaaatcgaagagc

SEQ ID NO: 815 - DNA, 22 bp, synthetic construct
  misc_feature 1..22: note = Description of Artificial Sequence: Synthetic primer
  source 1..22: mol_type = other DNA
agcttcacaaatgagagttcgc

SEQ ID NO: 816 - DNA, 21 bp, synthetic construct
  misc_feature 1..21: note = Description of Artificial Sequence: Synthetic primer
  source 1..21: mol_type = other DNA
tcgtgagaaggtagttgatgg

SEQ ID NO: 817 - DNA, 26 bp, synthetic construct
  misc_feature 1..26: note = Description of Artificial Sequence: Synthetic primer
  source 1..26: mol_type = other DNA
acagaatagtggagtgttacatttgg

SEQ ID NO: 818 - DNA, 28 bp, synthetic construct
  misc_feature 1..28: note = Description of Artificial Sequence: Synthetic primer
  source 1..28: mol_type = other DNA
ataatagtaagcaaagaaatcaacttgg

SEQ ID NO: 819 - DNA, 24 bp, synthetic construct
  misc_feature 1..24: note = Description of Artificial Sequence: Synthetic primer
  source 1..24: mol_type = other DNA
acaacttgccagagtacatgaaag

SEQ ID NO: 820 - DNA, 23 bp, synthetic construct
  misc_feature 1..23: note = Description of Artificial Sequence: Synthetic primer
  source 1..23: mol_type = other DNA
cgcgcagtatgaattttcctttg

SEQ ID NO: 821 - DNA, 26 bp, synthetic construct
  misc_feature 1..26: note = Description of Artificial Sequence: Synthetic primer
  source 1..26: mol_type = other DNA
ggatctgaagagctaatatcaatggc

SEQ ID NO: 822 - DNA, 24 bp, synthetic construct
  misc_feature 1..24: note = Description of Artificial Sequence: Synthetic primer
  source 1..24: mol_type = other DNA
agttcgtataatcttaggttgggg

SEQ ID NO: 823 - DNA, 23 bp, synthetic construct
  misc_feature 1..23: note = Description of Artificial Sequence: Synthetic primer
  source 1..23: mol_type = other DNA
tcaaaagatgtagtggcttctgc

SEQ ID NO: 824 - DNA, 24 bp, synthetic construct
  misc_feature 1..24: note = Description of Artificial Sequence: Synthetic primer
  source 1..24: mol_type = other DNA
attaagagtggtctaggaatagcg

SEQ ID NO: 825 - DNA, 26 bp, synthetic construct
  misc_feature 1..26: note = Description of Artificial Sequence: Synthetic primer
  source 1..26: mol_type = other DNA
caatatggtgtaacagatgaagaagc

SEQ ID NO: 826 - DNA, 26 bp, synthetic construct
  misc_feature 1..26: note = Description of Artificial Sequence: Synthetic primer
  source 1..26: mol_type = other DNA
tgagagtatcaatcaaattcttgagc

SEQ ID NO: 827 - DNA, 20 bp, synthetic construct
  misc_feature 1..20: note = Description of Artificial Sequence: Synthetic primer
  source 1..20: mol_type = other DNA
agccaactttgaaccatcca

SEQ ID NO: 828 - DNA, 28 bp, synthetic construct
  misc_feature 1..28: note = Description of Artificial Sequence: Synthetic primer
  source 1..28: mol_type = other DNA
aaagagactgaatgaaatcaaaagacca

SEQ ID NO: 829 - DNA, 22 bp, synthetic construct
  misc_feature 1..22: note = Description of Artificial Sequence: Synthetic primer
  source 1..22: mol_type = other DNA
gaggaagatgtgaaaaggatgc

SEQ ID NO: 830 - DNA, 22 bp, synthetic construct
  misc_feature 1..22: note = Description of Artificial Sequence: Synthetic primer
  source 1..22: mol_type = other DNA
gcctaaattcaagagcagtggc

SEQ ID NO: 831 - DNA, 28 bp, synthetic construct
  misc_feature 1..28: note = Description of Artificial Sequence: Synthetic primer
  source 1..28: mol_type = other DNA
caggaaaattcaaaacaaacataagtgg

SEQ ID NO: 832 - DNA, 23 bp, synthetic construct
  misc_feature 1..23: note = Description of Artificial Sequence: Synthetic primer
  source 1..23: mol_type = other DNA
agcttcctctaaaatgctttcgc

SEQ ID NO: 833 - DNA, 24 bp, synthetic construct
  misc_feature 1..24: note = Description of Artificial Sequence: Synthetic primer
  source 1..24: mol_type = other DNA
aggcgaaagcattttagaggaagc

SEQ ID NO: 834 - DNA, 24 bp, synthetic construct
  misc_feature 1..24: note = Description of Artificial Sequence: Synthetic primer
  source 1..24: mol_type = other DNA
agcttctattcttgtggtccttcg

SEQ ID NO: 835 - DNA, 22 bp, synthetic construct
  misc_feature 1..22: note = Description of Artificial Sequence: Synthetic primer
  source 1..22: mol_type = other DNA
ggtggaggcatactaaacttgg

SEQ ID NO: 836 - DNA, 28 bp, synthetic construct
  misc_feature 1..28: note = Description of Artificial Sequence: Synthetic primer
  source 1..28: mol_type = other DNA
tgaaaagctctaattcatctaatgttcc

SEQ ID NO: 837 - DNA, 25 bp, synthetic construct
  misc_feature 1..25: note = Description of Artificial Sequence: Synthetic primer
  source 1..25: mol_type = other DNA
gatgggatgtggaaatgataaatga

SEQ ID NO: 838 - DNA, 24 bp, synthetic construct
  misc_feature 1..24: note = Description of Artificial Sequence: Synthetic primer
  source 1..24: mol_type = other DNA
attttgatggtgatgtgttgatct

SEQ ID NO: 839 - DNA, 29 bp, synthetic construct
  misc_feature 1..29: note = Description of Artificial Sequence: Synthetic primer
  source 1..29: mol_type = other DNA
ctacaagaagcaaaatggtattacagtgg

SEQ ID NO: 840 - DNA, 23 bp, synthetic construct
  misc_feature 1..23: note = Description of Artificial Sequence: Synthetic primer
  source 1..23: mol_type = other DNA
gcacaataagaactggtgctccc

SEQ ID NO: 841 - DNA, 22 bp, synthetic construct
  misc_feature 1..22: note = Description of Artificial Sequence: Synthetic primer
  source 1..22: mol_type = other DNA
ggagcaccagttcttattgtgc

SEQ ID NO: 842 - DNA, 23 bp, synthetic construct
  misc_feature 1..23: note = Description of Artificial Sequence: Synthetic primer
  source 1..23: mol_type = other DNA
gcactgtgacgaattatggtagg

SEQ ID NO: 843 - DNA, 20 bp, synthetic construct
  misc_feature 1..20: note = Description of Artificial Sequence: Synthetic primer
  source 1..20: mol_type = other DNA
aaagaggtgatgctccgacg

SEQ ID NO: 844 - DNA, 23 bp, synthetic construct
  misc_feature 1..23: note = Description of Artificial Sequence: Synthetic primer
  source 1..23: mol_type = other DNA
agattatcctgagaactgtgacc

SEQ ID NO: 845 - DNA, 26 bp, synthetic construct
  misc_feature 1..26: note = Description of Artificial Sequence: Synthetic primer
  source 1..26: mol_type = other DNA
tcagaagagatcagcaaactatcaac

SEQ ID NO: 846 - DNA, 25 bp, synthetic construct
  misc_feature 1..25: note = Description of Artificial Sequence: Synthetic primer
  source 1..25: mol_type = other DNA
cttgaaaggagtagaaagtgattga

SEQ ID NO: 847 - DNA, 24 bp, synthetic construct
  misc_feature 1..24: note = Description of Artificial Sequence: Synthetic primer
  source 1..24: mol_type = other DNA
tgcaaagacttggaatctcttacc

SEQ ID NO: 848 - DNA, 24 bp, synthetic construct
  misc_feature 1..24: note = Description of Artificial Sequence: Synthetic primer
  source 1..24: mol_type = other DNA
catacacatttttgttggtgttgc

SEQ ID NO: 849 - DNA, 23 bp, synthetic construct
  misc_feature 1..23: note = Description of Artificial Sequence: Synthetic primer
  source 1..23: mol_type = other DNA
gaggcaattttatggtgtcttcc

SEQ ID NO: 850 - DNA, 23 bp, synthetic construct
  misc_feature 1..23: note = Description of Artificial Sequence: Synthetic primer
  source 1..23: mol_type = other DNA
ttgttttgtgtcttgtctcttcc

SEQ ID NO: 851 - DNA, 25 bp, synthetic construct
  misc_feature 1..25: note = Description of Artificial Sequence: Synthetic primer
  source 1..25: mol_type = other DNA
ggacaataggagtttcatttgagcc

SEQ ID NO: 852 - DNA, 23 bp, synthetic construct
  misc_feature 1..23: note = Description of Artificial Sequence: Synthetic primer
  source 1..23: mol_type = other DNA
tctcaaccacattagtgaagagc

SEQ ID NO: 853 - DNA, 24 bp, synthetic construct
  misc_feature 1..24: note = Description of Artificial Sequence: Synthetic primer
  source 1..24: mol_type = other DNA
tgggatgttagtgctatgaatggg

SEQ ID NO: 854 - DNA, 30 bp, synthetic construct
  misc_feature 1..30: note = Description of Artificial Sequence: Synthetic primer
  source 1..30: mol_type = other DNA
gaggctttttccttttaacacatcaaatgc

SEQ ID NO: 855 - DNA, 28 bp, synthetic construct
  misc_feature 1..28: note = Description of Artificial Sequence: Synthetic primer
  source 1..28: mol_type = other DNA
taagagaagcaagatggtattatgatgg

SEQ ID NO: 856 - DNA, 27 bp, synthetic construct
  misc_feature 1..27: note = Description of Artificial Sequence: Synthetic primer
  source 1..27: mol_type = other DNA
gtattatggtagggtatccattaaagc

SEQ ID NO: 857 - DNA, 23 bp, synthetic construct
  misc_feature 1..23: note = Description of Artificial Sequence: Synthetic primer
  source 1..23: mol_type = other DNA
cgtgtatgtgaagagaaagctcg

SEQ ID NO: 858 - DNA, 23 bp, synthetic construct
  misc_feature 1..23: note = Description of Artificial Sequence: Synthetic primer
  source 1..23: mol_type = other DNA
agtacatgatcttttgtttggcg

SEQ ID NO: 859 - DNA, 21 bp, synthetic construct
  misc_feature 1..21: note = Description of Artificial Sequence: Synthetic primer
  source 1..21: mol_type = other DNA
cagccaactttgaaccatcca

SEQ ID NO: 860 - DNA, 22 bp, synthetic construct
  misc_feature 1..22: note = Description of Artificial Sequence: Synthetic primer
  source 1..22: mol_type = other DNA
gcttgaaagagactgaacgaaa

SEQ ID NO: 861 - DNA, 23 bp, synthetic construct
  misc_feature 1..23: note = Description of Artificial Sequence: Synthetic primer
  source 1..23: mol_type = other DNA
cgacgaagatgtgaaaaggatgc

SEQ ID NO: 862 - DNA, 20 bp, synthetic construct
  misc_feature 1..20: note = Description of Artificial Sequence: Synthetic primer
  source 1..20: mol_type = other DNA
accatgttgacgtagaagcc

SEQ ID NO: 863 - DNA, 24 bp, synthetic construct
  misc_feature 1..24: note = Description of Artificial Sequence: Synthetic primer
  source 1..24: mol_type = other DNA
agctagaattttcacaactgaacg

SEQ ID NO: 864 - DNA, 23 bp, synthetic construct
  misc_feature 1..23: note = Description of Artificial Sequence: Synthetic primer
  source 1..23: mol_type = other DNA
gcttctattcttgtggtccttcg

SEQ ID NO: 865 - DNA, 26 bp, synthetic construct
  misc_feature 1..26: note = Description of Artificial Sequence: Synthetic primer
  source 1..26: mol_type = other DNA
tacgatattgaagtagtgaatcatgc

SEQ ID NO: 866 - DNA, 23 bp, synthetic construct
  misc_feature 1..23: note = Description of Artificial Sequence: Synthetic primer
  source 1..23: mol_type = other DNA
ttggcaaactcaagcaaaatagg

SEQ ID NO: 867 - DNA, 23 bp, synthetic construct
  misc_feature 1..23: note = Description of Artificial Sequence: Synthetic primer
  source 1..23: mol_type = other DNA
tggtggaggcatactaaacttgg

SEQ ID NO: 868 - DNA, 29 bp, synthetic construct
  misc_feature 1..29: note = Description of Artificial Sequence: Synthetic primer
  source 1..29: mol_type = other DNA
gtgaaaagctctaattcatctaatgttcc

SEQ ID NO: 869 - DNA, 26 bp, synthetic construct
  misc_feature 1..26: note = Description of Artificial Sequence: Synthetic primer
  source 1..26: mol_type = other DNA
gatgggatgtggaaatgataaatgaa

SEQ ID NO: 870 - DNA, 26 bp, synthetic construct
  misc_feature 1..26: note = Description of Artificial Sequence: Synthetic primer
  source 1..26: mol_type = other DNA
attttgatggtgatttgttgatctct

SEQ ID NO: 871 - DNA, 29 bp, synthetic construct
  misc_feature 1..29: note = Description of Artificial Sequence: Synthetic primer
  source 1..29: mol_type = other DNA
ctacaagaagcaaaatggtactacagtgg

SEQ ID NO: 872 - DNA, 23 bp, synthetic construct
  misc_feature 1..23: note = Description of Artificial Sequence: Synthetic primer
  source 1..23: mol_type = other DNA
gcacaataagaactggtgctccc

SEQ ID NO: 873 - DNA, 22 bp, synthetic construct
  misc_feature 1..22: note = Description of Artificial Sequence: Synthetic primer
  source 1..22: mol_type = other DNA
ggagcaccagttcttattgtgc

SEQ ID NO: 874 - DNA, 23 bp, synthetic construct
  misc_feature 1..23: note = Description of Artificial Sequence: Synthetic primer
  source 1..23: mol_type = other DNA
gcactgtgacgaattatggtagg

SEQ ID NO: 875 - DNA, 19 bp, synthetic construct
  misc_feature 1..19: note = Description of Artificial Sequence: Synthetic primer
  source 1..19: mol_type = other DNA
aagaggtgatgctccgacg

SEQ ID NO: 876 - DNA, 24 bp, synthetic construct
  misc_feature 1..24: note = Description of Artificial Sequence: Synthetic primer
  source 1..24: mol_type = other DNA
tagattatcctgagaactgtgacc

SEQ ID NO: 877 - DNA, 30 bp, synthetic construct; identical to SEQ ID NO: 645
  misc_feature 1..30: note = Description of Artificial Sequence: Synthetic primer
  source 1..30: mol_type = other DNA

SEQ ID NO: 878 - DNA, 21 bp, synthetic construct
  misc_feature 1..21: note = Description of Artificial Sequence: Synthetic primer
  source 1..21: mol_type = other DNA
ccgaaagcgaagagcatcagc

SEQ ID NO: 879 - DNA, 27 bp, synthetic construct
  misc_feature 1..27: note = Description of Artificial Sequence: Synthetic primer
  source 1..27: mol_type = other DNA
aattacttcatggtcttcaacctttgg

SEQ ID NO: 880 - DNA, 26 bp, synthetic construct
  misc_feature 1..26: note = Description of Artificial Sequence: Synthetic primer
  source 1..26: mol_type = other DNA
ctataaaatagccttgttccctaagc

SEQ ID NO: 881 - DNA, 22 bp, synthetic construct
  misc_feature 1..22: note = Description of Artificial Sequence: Synthetic primer
  source 1..22: mol_type = other DNA
agcttcacaaatgagagttcgc

SEQ ID NO: 882 - DNA, 20 bp, synthetic construct
  misc_feature 1..20: note = Description of Artificial Sequence: Synthetic primer
  source 1..20: mol_type = other DNA
cggatagggtgcattagggc

SEQ ID NO: 883 - DNA, 21 bp, synthetic construct
  misc_feature 1..21: note = Description of Artificial Sequence: Synthetic primer
  source 1..21: mol_type = other DNA
atgcaccctatccgaaagagc

SEQ ID NO: 884 - DNA, 25 bp, synthetic construct
  misc_feature 1..25: note = Description of Artificial Sequence: Synthetic primer
  source 1..25: mol_type = other DNA
ttccttttgatgtagttgttgaagc

SEQ ID NO: 885 - DNA, 26 bp, synthetic construct
  misc_feature 1..26: note = Description of Artificial Sequence: Synthetic primer
  source 1..26: mol_type = other DNA
acagaatagtggagtgttacatttgg

SEQ ID NO: 886 - DNA, 28 bp, synthetic construct
  misc_feature 1..28: note = Description of Artificial Sequence: Synthetic primer
  source 1..28: mol_type = other DNA
ataatagtaagcaaagaaatcaacttgg

SEQ ID NO: 887 - DNA, 23 bp, synthetic construct
  misc_feature 1..23: note = Description of Artificial Sequence: Synthetic primer
  source 1..23: mol_type = other DNA
tcatcaggtgggatatttttgct

SEQ ID NO: 888 - DNA, 21 bp, synthetic construct
  misc_feature 1..21: note = Description of Artificial Sequence: Synthetic primer
  source 1..21: mol_type = other DNA
acataactcgcgcagaatgaa

SEQ ID NO: 889 - DNA, 26 bp, synthetic construct
  misc_feature 1..26: note = Description of Artificial Sequence: Synthetic primer
  source 1..26: mol_type = other DNA
ggatctgaagagctaatatcaatggc

SEQ ID NO: 890 - DNA, 22 bp, synthetic construct
  misc_feature 1..22: note = Description of Artificial Sequence: Synthetic primer
  source 1..22: mol_type = other DNA
tcgtataatgttaggttggggc

SEQ ID NO: 891 - DNA, 23 bp, synthetic construct
  misc_feature 1..23: note = Description of Artificial Sequence: Synthetic primer
  source 1..23: mol_type = other DNA
tcaaaagatgtagtggcttctgc

SEQ ID NO: 892 - DNA, 24 bp, synthetic construct
  misc_feature 1..24: note = Description of Artificial Sequence: Synthetic primer
  source 1..24: mol_type = other DNA
attaagagtggtctaggaatagcg

SEQ ID NO: 893 - DNA, 26 bp, synthetic construct
  misc_feature 1..26: note = Description of Artificial Sequence: Synthetic primer
  source 1..26: mol_type = other DNA
acaaaaggttgaggaattaaaagagg

SEQ ID NO: 894 - DNA, 20 bp, synthetic construct
  misc_feature 1..20: note = Description of Artificial Sequence: Synthetic primer
  source 1..20: mol_type = other DNA
cccacaaggaaacatcatgc

SEQ ID NO: 895 - DNA, 23 bp, synthetic construct
  misc_feature 1..23: note = Description of Artificial Sequence: Synthetic primer
  source 1..23: mol_type = other DNA
cacacctaaatgagtttttggcg

SEQ ID NO: 896 - DNA, 22 bp, synthetic construct
  misc_feature 1..22: note = Description of Artificial Sequence: Synthetic primer
  source 1..22: mol_type = other DNA
cctgctgatttcactaagctcc

SEQ ID NO: 897 - DNA, 28 bp, synthetic construct
  misc_feature 1..28: note = Description of Artificial Sequence: Synthetic primer
  source 1..28: mol_type = other DNA
tgtggatgttaggagtctattatgaacc

SEQ ID NO: 898 - DNA, 24 bp, synthetic construct
  misc_feature 1..24: note = Description of Artificial Sequence: Synthetic primer
  source 1..24: mol_type = other DNA
atttcttgccaaagagtattgggg

SEQ ID NO: 899 - DNA, 25 bp, synthetic construct
  misc_feature 1..25: note = Description of Artificial Sequence: Synthetic primer
  source 1..25: mol_type = other DNA
ttgttatgaagagtttgagcaagtg

SEQ ID NO: 900 - DNA, 28 bp, synthetic construct
  misc_feature 1..28: note = Description of Artificial Sequence: Synthetic primer
  source 1..28: mol_type = other DNA
ctctataagtttcttcttttgtaagcac

SEQ ID NO: 901 - DNA, 23 bp, synthetic construct
  misc_feature 1..23: note = Description of Artificial Sequence: Synthetic primer
  source 1..23: mol_type = other DNA
gaagctcgatggttgaatagtgg

SEQ ID NO: 902 - DNA, 27 bp, synthetic construct
  misc_feature 1..27: note = Description of Artificial Sequence: Synthetic primer
  source 1..27: mol_type = other DNA
catgagcctacaaataataacagatgc

SEQ ID NO: 903 - DNA, 27 bp, synthetic construct
  misc_feature 1..27: note = Description of Artificial Sequence: Synthetic primer
  source 1..27: mol_type = other DNA
aaattagcttcacccatattacttagg

SEQ ID NO: 904 - DNA, 22 bp, synthetic construct
  misc_feature 1..22: note = Description of Artificial Sequence: Synthetic primer
  source 1..22: mol_type = other DNA
tgggatcaattagcaaagcagc

SEQ ID NO: 905 - DNA, 24 bp, synthetic construct
  misc_feature 1..24: note = Description of Artificial Sequence: Synthetic primer
  source 1..24: mol_type = other DNA
tccactcaaatcttagcatcatca

SEQ ID NO: 906 - DNA, 25 bp, synthetic construct
  misc_feature 1..25: note = Description of Artificial Sequence: Synthetic primer
  source 1..25: mol_type = other DNA
tggatgaaatgtttttgtaggacga

SEQ ID NO: 907 - DNA, 28 bp, synthetic construct
  misc_feature 1..28: note = Description of Artificial Sequence: Synthetic primer
  source 1..28: mol_type = other DNA
gaaaaggttgaggaattaaaagaagtgg

SEQ ID NO: 908 - DNA, 29 bp, synthetic construct
  misc_feature 1..29: note = Description of Artificial Sequence: Synthetic primer
  source 1..29: mol_type = other DNA
gtttcaaaatgataagacaatgccaaacg

SEQ ID NO: 909 - DNA, 23 bp, synthetic construct
  misc_feature 1..23: note = Description of Artificial Sequence: Synthetic primer
  source 1..23: mol_type = other DNA
aaaatgtttggcaagtgataccc

SEQ ID NO: 910 - DNA, 18 bp, synthetic construct
  misc_feature 1..18: note = Description of Artificial Sequence: Synthetic primer
  source 1..18: mol_type = other DNA
gggcctctctagggctcg

SEQ ID NO: 911 - DNA, 25 bp, synthetic construct
  misc_feature 1..25: note = Description of Artificial Sequence: Synthetic primer
  source 1..25: mol_type = other DNA
taggattgtggaattgtacctttgg

SEQ ID NO: 912 - DNA, 24 bp, synthetic construct
  misc_feature 1..24: note = Description of Artificial Sequence: Synthetic primer
  source 1..24: mol_type = other DNA
tgcatcataatcagtaattgaggc

SEQ ID NO: 913 - DNA, 27 bp, synthetic construct
  misc_feature 1..27: note = Description of Artificial Sequence: Synthetic primer
  source 1..27: mol_type = other DNA
aggacgttttgaattgttatgaagagt

SEQ ID NO: 914 - DNA, 28 bp, synthetic construct
  misc_feature 1..28: note = Description of Artificial Sequence: Synthetic primer
  source 1..28: mol_type = other DNA
tctttatgttacttctttttctagcact

SEQ ID NO: 915 - DNA, 26 bp, synthetic construct
  misc_feature 1..26: note = Description of Artificial Sequence: Synthetic primer
  source 1..26: mol_type = other DNA
actcaatcaagaatacatgcaaacat

SEQ ID NO: 916 - DNA, 24 bp, synthetic construct
  misc_feature 1..24: note = Description of Artificial Sequence: Synthetic primer
  source 1..24: mol_type = other DNA
gcacttgctcaaactcttcataac

SEQ ID NO: 917 - DNA, 23 bp, synthetic construct
  misc_feature 1..23: note = Description of Artificial Sequence: Synthetic primer
  source 1..23: mol_type = other DNA
tgtttgcatagaggactcatccc

SEQ ID NO: 918 - DNA, 21 bp, synthetic construct
  misc_feature 1..21: note = Description of Artificial Sequence: Synthetic primer
  source 1..21: mol_type = other DNA
tctttcgatctttggagagcc

SEQ ID NO: 919 - DNA, 22 bp, synthetic construct
  misc_feature 1..22: note = Description of Artificial Sequence: Synthetic primer
  source 1..22: mol_type = other DNA
gtttgcatagaggactcatccc

SEQ ID NO: 920 - DNA, 23 bp, synthetic construct
  misc_feature 1..23: note = Description of Artificial Sequence: Synthetic primer
  source 1..23: mol_type = other DNA
agttttcattccaaccaaagagc

SEQ ID NO: 921 - DNA, 22 bp, synthetic construct
  misc_feature 1..22: note = Description of Artificial Sequence: Synthetic primer
  source 1..22: mol_type = other DNA
tggtgtttgtgaagaagaagcc

SEQ ID NO: 922 - DNA, 21 bp, synthetic construct
  misc_feature 1..21: note = Description of Artificial Sequence: Synthetic primer
  source 1..21: mol_type = other DNA
ggtgaagctacttgagttggc

SEQ ID NO: 923 - DNA, 23 bp, synthetic construct
  misc_feature 1..23: note = Description of Artificial Sequence: Synthetic primer
  source 1..23: mol_type = other DNA
tttgtgaagccaactcaagtagc

SEQ ID NO: 924 - DNA, 23 bp, synthetic construct
  misc_feature 1..23: note = Description of Artificial Sequence: Synthetic primer
  source 1..23: mol_type = other DNA
attggatgaataagcaaagcagc

SEQ ID NO: 925 - DNA, 23 bp, synthetic construct
  misc_feature 1..23: note = Description of Artificial Sequence: Synthetic primer
  source 1..23: mol_type = other DNA
tcatcctttggaaaaccctttgg

SEQ ID NO: 926 - DNA, 21 bp, synthetic construct
  misc_feature 1..21: note = Description of Artificial Sequence: Synthetic primer
  source 1..21: mol_type = other DNA
aagcaaccgaaagcaaagagc

SEQ ID NO: 927 - DNA, 30 bp, synthetic construct
  misc_feature 1..30: note = Description of Artificial Sequence: Synthetic primer
  source 1..30: mol_type = other DNA
catattcgacaagtacaagaatgaaaaagg

SEQ ID NO: 928 - DNA, 22 bp, synthetic construct
  misc_feature 1..22: note = Description of Artificial Sequence: Synthetic primer
  source 1..22: mol_type = other DNA
ctccatgaactctcatttgtgc

SEQ ID NO: 929 - DNA, 24 bp, synthetic construct
  misc_feature 1..24: note = Description of Artificial Sequence: Synthetic primer
  source 1..24: mol_type = other DNA
ggagtgctatttctgggtttatgg

SEQ ID NO: 930 - DNA, 24 bp, synthetic construct
  misc_feature 1..24: note = Description of Artificial Sequence: Synthetic primer
  source 1..24: mol_type = other DNA
aggctctagttcttcaagtgtacc

SEQ ID NO: 931 - DNA, 20 bp, synthetic construct
  misc_feature 1..20: note = Description of Artificial Sequence: Synthetic primer
  source 1..20: mol_type = other DNA
gttggggttgatagtgcagg

SEQ ID NO: 932 - DNA, 27 bp, synthetic construct
  misc_feature 1..27: note = Description of Artificial Sequence: Synthetic primer
  source 1..27: mol_type = other DNA
tcattcataactcttccaactattgcc

SEQ ID NO: 933 - DNA, 21 bp, synthetic construct
  misc_feature 1..21: note = Description of Artificial Sequence: Synthetic primer
  source 1..21: mol_type = other DNA
ggagcggaagaaatcatcagg

SEQ ID NO: 934 - DNA, 22 bp, synthetic construct
  misc_feature 1..22: note = Description of Artificial Sequence: Synthetic primer
  source 1..22: mol_type = other DNA
tgggttgtgtaaagccatctcc

SEQ ID NO: 935 - DNA, 22 bp, synthetic construct
  misc_feature 1..22: note = Description of Artificial Sequence: Synthetic primer
  source 1..22: mol_type = other DNA
attcaacgattggggttgtctt

SEQ ID NO: 936 - DNA, 21 bp, synthetic construct
  misc_feature 1..21: note = Description of Artificial Sequence: Synthetic primer
  source 1..21: mol_type = other DNA
ccgaaagcaaagagcatcagc

SEQ ID NO: 937 - DNA, 30 bp, synthetic construct; identical to SEQ ID NO: 927
  misc_feature 1..30: note = Description of Artificial Sequence: Synthetic primer
  source 1..30: mol_type = other DNA

SEQ ID NO: 938 - DNA, 22 bp, synthetic construct
  misc_feature 1..22: note = Description of Artificial Sequence: Synthetic primer
  source 1..22: mol_type = other DNA
ctccatgaactctcatttgtgc

SEQ ID NO: 939 - DNA, 24 bp, synthetic construct
  misc_feature 1..24: note = Description of Artificial Sequence: Synthetic primer
  source 1..24: mol_type = other DNA
agaatagtggagtgctatttctgg

SEQ ID NO: 940 - DNA, 29 bp, synthetic construct
  misc_feature 1..29: note = Description of Artificial Sequence: Synthetic primer
  source 1..29: mol_type = other DNA
attattagtctgatttgggaagtttctgc

SEQ ID NO: 941 - DNA, 25 bp, synthetic construct
  misc_feature 1..25: note = Description of Artificial Sequence: Synthetic primer
  source 1..25: mol_type = other DNA
tggagtgctatttctgggtttatgg

SEQ ID NO: 942 - DNA, 27 bp, synthetic construct
  misc_feature 1..27: note = Description of Artificial Sequence: Synthetic primer
  source 1..27: mol_type = other DNA
atttggtgattattagtctgatttggg

SEQ ID NO: 943 - DNA, 20 bp, synthetic construct
  misc_feature 1..20: note = Description of Artificial Sequence: Synthetic primer
  source 1..20: mol_type = other DNA
gttggggttgatagtgcagg

SEQ ID NO: 944 - DNA, 27 bp, synthetic construct
  misc_feature 1..27: note = Description of Artificial Sequence: Synthetic primer
  source 1..27: mol_type = other DNA
tcattcataactcttccaactattgcc

SEQ ID NO: 945 - DNA, 22 bp, synthetic construct
  misc_feature 1..22: note = Description of Artificial Sequence: Synthetic primer
  source 1..22: mol_type = other DNA
gaaattgtggcttcaactgtgg

SEQ ID NO: 946 - DNA, 23 bp, synthetic construct
  misc_feature 1..23: note = Description of Artificial Sequence: Synthetic primer
  source 1..23: mol_type = other DNA
gagcaaagtgggttgtgtaaagc

SEQ ID NO: 947 - DNA, 25 bp, synthetic construct
  misc_feature 1..25: note = Description of Artificial Sequence: Synthetic primer
  source 1..25: mol_type = other DNA
agaaatcatcaggagaaattgtggc

SEQ ID NO: 948 - DNA, 22 bp, synthetic construct
  misc_feature 1..22: note = Description of Artificial Sequence: Synthetic primer
  source 1..22: mol_type = other DNA
tgggttgtgtaaagccatctcc

SEQ ID NO: 949 - DNA, 29 bp, synthetic construct
  misc_feature 1..29: note = Description of Artificial Sequence: Synthetic primer
  source 1..29: mol_type = other DNA
cacacaaatcttagtatcttcaaatgaca

SEQ ID NO: 950 - DNA, 27 bp, synthetic construct
  misc_feature 1..27: note = Description of Artificial Sequence: Synthetic primer
  source 1..27: mol_type = other DNA
caaatcttgttgtgaaatgttgtaatg

SEQ ID NO: 951 - DNA, 27 bp, synthetic construct
  misc_feature 1..27: note = Description of Artificial Sequence: Synthetic primer
  source 1..27: mol_type = other DNA
aaaaggttgaggaattaaaagaagtgg

SEQ ID NO: 952 - DNA, 30 bp, synthetic construct
  misc_feature 1..30: note = Description of Artificial Sequence: Synthetic primer
  source 1..30: mol_type = other DNA
agtttcaaaatgataagacaatcccaaacg

SEQ ID NO: 953 - DNA, 25 bp, synthetic construct
  misc_feature 1..25: note = Description of Artificial Sequence: Synthetic primer
  source 1..25: mol_type = other DNA
tgaaaaattcaaagacgaggatggg

SEQ ID NO: 954 - DNA, 25 bp, synthetic construct
  misc_feature 1..25: note = Description of Artificial Sequence: Synthetic primer
  source 1..25: mol_type = other DNA
catttaggtgtgttgttgtgaaagc

SEQ ID NO: 955 - DNA, 23 bp, synthetic construct
  misc_feature 1..23: note = Description of Artificial Sequence: Synthetic primer
  source 1..23: mol_type = other DNA
acttgctttcacaacaacacacc

SEQ ID NO: 956 - DNA, 20 bp, synthetic construct
  misc_feature 1..20: note = Description of Artificial Sequence: Synthetic primer
  source 1..20: mol_type = other DNA
aagggcctctctagggctcg

SEQ ID NO: 957 - DNA, 21 bp, synthetic construct
  misc_feature 1..21: note = Description of Artificial Sequence: Synthetic primer
  source 1..21: mol_type = other DNA
acaccatgaagacgatgatcc

SEQ ID NO: 958 - DNA, 23 bp, synthetic construct
  misc_feature 1..23: note = Description of Artificial Sequence: Synthetic primer
  source 1..23: mol_type = other DNA
acctgctgacttcactaagttcc

SEQ ID NO: 959 - DNA, 28 bp, synthetic construct
  misc_feature 1..28: note = Description of Artificial Sequence: Synthetic primer
  source 1..28: mol_type = other DNA
agataggattgtggaattatacctttgg

SEQ ID NO: 960 - DNA, 23 bp, synthetic construct
  misc_feature 1..23: note = Description of Artificial Sequence: Synthetic primer
  source 1..23: mol_type = other DNA
agctcaagttcttcaagtgtacc

SEQ ID NO: 961 - DNA, 26 bp, synthetic construct
  misc_feature 1..26: note = Description of Artificial Sequence: Synthetic primer
  source 1..26: mol_type = other DNA
tttgaattgttatgaagagtttgagc

SEQ ID NO: 962 - DNA, 27 bp, synthetic construct
  misc_feature 1..27: note = Description of Artificial Sequence: Synthetic primer
  source 1..27: mol_type = other DNA
tgtattgttcttctttttctagcactt

SEQ ID NO: 963 - DNA, 24 bp, synthetic construct
  misc_feature 1..24: note = Description of Artificial Sequence: Synthetic primer
  source 1..24: mol_type = other DNA
atttggatgaagctcgatgtttgc

SEQ ID NO: 964 - DNA, 28 bp, synthetic construct
  misc_feature 1..28: note = Description of Artificial Sequence: Synthetic primer
  source 1..28: mol_type = other DNA
ccatgagcctacaaatagtaacagatgc

SEQ ID NO: 965 - DNA, 20 bp, synthetic construct
  misc_feature 1..20: note = Description of Artificial Sequence: Synthetic primer
  source 1..20: mol_type = other DNA
tgaggaacattcagcagtgg

SEQ ID NO: 966 - DNA, 30 bp, synthetic construct
  misc_feature 1..30: note = Description of Artificial Sequence: Synthetic primer
  source 1..30: mol_type = other DNA
gcttcaaaaactcttcatttatttctttcc

SEQ ID NO: 967 - DNA, 28 bp, synthetic construct
  misc_feature 1..28: note = Description of Artificial Sequence: Synthetic primer
  source 1..28: mol_type = other DNA
aagaaataaatgaagagtttttgaagcc

SEQ ID NO: 968 - DNA, 23 bp, synthetic construct
  misc_feature 1..23: note = Description of Artificial Sequence: Synthetic primer
  source 1..23: mol_type = other DNA
ccaacgtgtgtataaccatctcc

SEQ ID NO: 969 - DNA, 24 bp, synthetic construct
  misc_feature 1..24: note = Description of Artificial Sequence: Synthetic primer
  source 1..24: mol_type = other DNA
atgtcactatcaggactaatctcc

SEQ ID NO: 970 - DNA, 21 bp, synthetic construct
  misc_feature 1..21: note = Description of Artificial Sequence: Synthetic primer
  source 1..21: mol_type = other DNA
aaaatgagcatcccacaatgg

SEQ ID NO: 971 - DNA, 25 bp, synthetic construct
  misc_feature 1..25: note = Description of Artificial Sequence: Synthetic primer
  source 1..25: mol_type = other DNA
agctatgggaaaagaatcaatgagc

SEQ ID NO: 972 - DNA, 23 bp, synthetic construct
  misc_feature 1..23: note = Description of Artificial Sequence: Synthetic primer
  source 1..23: mol_type = other DNA
gagtttgaaatgaagagcagtgg

SEQ ID NO: 973 - DNA, 22 bp, synthetic construct
  misc_feature 1..22: note = Description of Artificial Sequence: Synthetic primer
  source 1..22: mol_type = other DNA
gacgagaaaaaggagttcaagg

SEQ ID NO: 974 - DNA, 27 bp, synthetic construct
  misc_feature 1..27: note = Description of Artificial Sequence: Synthetic primer
  source 1..27: mol_type = other DNA
tcatcaagtattgtttgagatgtttgg

SEQ ID NO: 975 - DNA, 25 bp, synthetic construct
  misc_feature 1..25: note = Description of Artificial Sequence: Synthetic primer
  source 1..25: mol_type = other DNA
gccgaaaaatgctcacaaagattgg

SEQ ID NO: 976 - DNA, 24 bp, synthetic construct
  misc_feature 1..24: note = Description of Artificial Sequence: Synthetic primer
  source 1..24: mol_type = other DNA
cttcccaatgcgtgttgaaagagg

SEQ ID NO: 977 - DNA, 26 bp, synthetic construct
  misc_feature 1..26: note = Description of Artificial Sequence: Synthetic primer
  source 1..26: mol_type = other DNA
accaacttccagattacatgaagata

SEQ ID NO: 978 - DNA, 20 bp, synthetic construct
  misc_feature 1..20: note = Description of Artificial Sequence: Synthetic primer
  source 1..20: mol_type = other DNA
tagcacgtcatacgccattt

SEQ ID NO: 979 - DNA, 30 bp, synthetic construct
  misc_feature 1..30: note = Description of Artificial Sequence: Synthetic primer
  source 1..30: mol_type = other DNA
gaacccttaattctagtcaatctttattgc

SEQ ID NO: 980 - DNA, 25 bp, synthetic construct
  misc_feature 1..25: note = Description of Artificial Sequence: Synthetic primer
  source 1..25: mol_type = other DNA
ttcctaaatcatcaacaagtcgagc

SEQ ID NO: 981 - DNA, 24 bp, synthetic construct
  misc_feature 1..24: note = Description of Artificial Sequence: Synthetic primer
  source 1..24: mol_type = other DNA
tgaactgaaaagaggagacaatcc

SEQ ID NO: 982 - DNA, 20 bp, synthetic construct
  misc_feature 1..20: note = Description of Artificial Sequence: Synthetic primer
  source 1..20: mol_type = other DNA
aatggagactcacccactcg

SEQ ID NO: 983 - DNA, 23 bp, synthetic construct
  misc_feature 1..23: note = Description of Artificial Sequence: Synthetic primer
  source 1..23: mol_type = other DNA
gccatagatttcgttaggacagc

SEQ ID NO: 984 - DNA, 23 bp, synthetic construct
  misc_feature 1..23: note = Description of Artificial Sequence: Synthetic primer
  source 1..23: mol_type = other DNA
gggaatggaagtgaagaacaagg

SEQ ID NO: 985 - DNA, 24 bp, synthetic construct
  misc_feature 1..24: note = Description of Artificial Sequence: Synthetic primer
  source 1..24: mol_type = other DNA
tcaaagaacaaccagcaatagtcc

SEQ ID NO: 986 - DNA, 24 bp, synthetic construct
  misc_feature 1..24: note = Description of Artificial Sequence: Synthetic primer
  source 1..24: mol_type = other DNA
ttggagtgattggataaaatgagc

SEQ ID NO: 987 - DNA, 24 bp, synthetic construct
  misc_feature 1..24: note = Description of Artificial Sequence: Synthetic primer
  source 1..24: mol_type = other DNA
gctatgggaaaagaatcaatgagc

SEQ ID NO: 988 - DNA, 22 bp, synthetic construct
  misc_feature 1..22: note = Description of Artificial Sequence: Synthetic primer
  source 1..22: mol_type = other DNA
agtttgaaatgaagagcagtgg

SEQ ID NO: 989 - DNA, 24 bp, synthetic construct
  misc_feature 1..24: note = Description of Artificial Sequence: Synthetic primer
  source 1..24: mol_type = other DNA
tcttgagaaggaggctgaaaatcc

SEQ ID NO: 990 - DNA, 24 bp, synthetic construct
  misc_feature 1..24: note = Description of Artificial Sequence: Synthetic primer
  source 1..24: mol_type = other DNA
ggagtttgaaatgaagagcagtgg

SEQ ID NO: 991 - DNA, 27 bp, synthetic construct
  misc_feature 1..27: note = Description of Artificial Sequence: Synthetic primer
  source 1..27: mol_type = other DNA
ggagagtttgagtaaagatgtgaaagg

SEQ ID NO: 992 - DNA, 24 bp, synthetic construct
  misc_feature 1..24: note = Description of Artificial Sequence: Synthetic primer
  source 1..24: mol_type = other DNA
tccaaccttttcattctccaatgc

SEQ ID NO: 993 - DNA, 26 bp, synthetic construct
  misc_feature 1..26: note = Description of Artificial Sequence: Synthetic primer
  source 1..26: mol_type = other DNA
tttgagtaaagatgtgaaaggaatgg

SEQ ID NO: 994 - DNA, 25 bp, synthetic construct
  misc_feature 1..25: note = Description of Artificial Sequence: Synthetic primer
  source 1..25: mol_type = other DNA
gatgtttggttgtgaaatctcttgc

SEQ ID NO: 995 - DNA, 23 bp, synthetic construct
  misc_feature 1..23: note = Description of Artificial Sequence: Synthetic primer
  source 1..23: mol_type = other DNA
gagccacagtttagatattgccg

SEQ ID NO: 996 - DNA, 21 bp, synthetic construct
  misc_feature 1..21: note = Description of Artificial Sequence: Synthetic primer
  source 1..21: mol_type = other DNA
agaggcttagctcatcaagcg

SEQ ID NO: 997 - DNA, 25 bp, synthetic construct
  misc_feature 1..25: note = Description of Artificial Sequence: Synthetic primer
  source 1..25: mol_type = other DNA
cgaccaacttccagattacatgaag

SEQ ID NO: 998 - DNA, 21 bp, synthetic construct
  misc_feature 1..21: note = Description of Artificial Sequence: Synthetic primer
  source 1..21: mol_type = other DNA
agcacgtcatacgccatttca

SEQ ID NO: 999 - DNA, 25 bp, synthetic construct
  misc_feature 1..25: note = Description of Artificial Sequence: Synthetic primer
  source 1..25: mol_type = other DNA
tggaggcaaattggtatcatagtgg

SEQ ID NO: 1000 - DNA, 23 bp, synthetic construct
  misc_feature 1..23: note = Description of Artificial Sequence: Synthetic primer
  source 1..23: mol_type = other DNA
aaaggtgggatattgaagcaagc

SEQ ID NO: 1001 - DNA, 30 bp, synthetic construct; identical to SEQ ID NO: 979
  misc_feature 1..30: note = Description of Artificial Sequence: Synthetic primer
  source 1..30: mol_type = other DNA

SEQ ID NO: 1002 - DNA, 25 bp, synthetic construct
  misc_feature 1..25: note = Description of Artificial Sequence: Synthetic primer
  source 1..25: mol_type = other DNA
ttcctaaatcatcaacaagtcgagc

SEQ ID NO: 1003 - DNA, 24 bp, synthetic construct
  misc_feature 1..24: note = Description of Artificial Sequence: Synthetic primer
  source 1..24: mol_type = other DNA
tgaactgaaaagaggagacaatcc

SEQ ID NO: 1004 - DNA, 20 bp, synthetic construct
  misc_feature 1..20: note = Description of Artificial Sequence: Synthetic primer
  source 1..20: mol_type = other DNA
aatggagactcacccactcg

SEQ ID NO: 1005 - DNA, 23 bp, synthetic construct
  misc_feature 1..23: note = Description of Artificial Sequence: Synthetic primer
  source 1..23: mol_type = other DNA
tggaaggaaatgaatgaagctcg

SEQ ID NO: 1006 - DNA, 21 bp, synthetic construct
  misc_feature 1..21: note = Description of Artificial Sequence: Synthetic primer
  source 1..21: mol_type = other DNA
accccatcttgctccttttgg

SEQ ID NO: 1007 - DNA, 23 bp, synthetic construct
  misc_feature 1..23: note = Description of Artificial Sequence: Synthetic primer
  source 1..23: mol_type = other DNA
gagcttgactatgttgaaaaccc

SEQ ID NO: 1008 - DNA, 24 bp, synthetic construct
  misc_feature 1..24: note = Description of Artificial Sequence: Synthetic primer
  source 1..24: mol_type = other DNA
ataaccttgttgtctaaccaatcg

SEQ ID NO: 1009 - DNA, 23 bp, synthetic construct
  misc_feature 1..23: note = Description of Artificial Sequence: Synthetic primer
  source 1..23: mol_type = other DNA
gcttcacaactaagagtgcatgg

SEQ ID NO: 1010 - DNA, 24 bp, synthetic construct
  misc_feature 1..24: note = Description of Artificial Sequence: Synthetic primer
  source 1..24: mol_type = other DNA
taatgtctagcctgtctcctttgc

SEQ ID NO: 1011 - DNA, 24 bp, synthetic construct
  misc_feature 1..24: note = Description of Artificial Sequence: Synthetic primer
  source 1..24: mol_type = other DNA
aacgatattcgaggaatgttaagc

SEQ ID NO: 1012 - DNA, 23 bp, synthetic construct
  misc_feature 1..23: note = Description of Artificial Sequence: Synthetic primer
  source 1..23: mol_type = other DNA
aggttttagctccagattcgagg

SEQ ID NO: 1013 - DNA, 28 bp, synthetic construct
  misc_feature 1..28: note = Description of Artificial Sequence: Synthetic primer
  source 1..28: mol_type = other DNA
taatggattgttacttttggacttttgg

SEQ ID NO: 1014 - DNA, 26 bp, synthetic construct
  misc_feature 1..26: note = Description of Artificial Sequence: Synthetic primer
  source 1..26: mol_type = other DNA
gtattgcttcagttaagaggtgtagc

SEQ ID NO: 1015 - DNA, 24 bp, synthetic construct
  misc_feature 1..24: note = Description of Artificial Sequence: Synthetic primer
  source 1..24: mol_type = other DNA
tcaactaccagagtacattcaacc

SEQ ID NO: 1016 - DNA, 30 bp, synthetic construct
  misc_feature 1..30: note = Description of Artificial Sequence: Synthetic primer
  source 1..30: mol_type = other DNA
gcaatatgatttgtccttagtaaattctcc

SEQ ID NO: 1017 - DNA, 22 bp, synthetic construct
  misc_feature 1..22: note = Description of Artificial Sequence: Synthetic primer
  source 1..22: mol_type = other DNA
cacttgttactgctgcttctcc

SEQ ID NO: 1018 - DNA, 24 bp, synthetic construct
  misc_feature 1..24: note = Description of Artificial Sequence: Synthetic primer
  source 1..24: mol_type = other DNA
gccaatgtcgttaagaactctacc

SEQ ID NO: 1019 - DNA, 25 bp, synthetic construct
  misc_feature 1..25: note = Description of Artificial Sequence: Synthetic primer
  source 1..25: mol_type = other DNA
tctgaatgaagagtgtctctatccc

SEQ ID NO: 1020 - DNA, 24 bp, synthetic construct
  misc_feature 1..24: note = Description of Artificial Sequence: Synthetic primer
  source 1..24: mol_type = other DNA
agcttctcttgtaaaaccatctcc

SEQ ID NO: 1021 - DNA, 24 bp, synthetic construct
  misc_feature 1..24: note = Description of Artificial Sequence: Synthetic primer
  source 1..24: mol_type = other DNA
atcatcgaaattgaaagacacagg

SEQ ID NO: 1022 - DNA, 20 bp, synthetic construct
  misc_feature 1..20: note = Description of Artificial Sequence: Synthetic primer
  source 1..20: mol_type = other DNA
gggcaagatagttgctctgc

SEQ ID NO: 1023 - DNA, 21 bp, synthetic construct
  misc_feature 1..21: note = Description of Artificial Sequence: Synthetic primer
  source 1..21: mol_type = other DNA
gagcaactatcttgcccaacc

SEQ ID NO: 1024 - DNA, 27 bp, synthetic construct
  misc_feature 1..27: note = Description of Artificial Sequence: Synthetic primer
  source 1..27: mol_type = other DNA
tcatatttgttgttaagagactccagg

SEQ ID NO: 1025 - DNA, 21 bp, synthetic construct
  misc_feature 1..21: note = Description of Artificial Sequence: Synthetic primer
  source 1..21: mol_type = other DNA
agcttatcgaggatgtgaggc

SEQ ID NO: 1026 - DNA, 20 bp, synthetic construct
  misc_feature 1..20: note = Description of Artificial Sequence: Synthetic primer
  source 1..20: mol_type = other DNA
tccatgaagcctaagaagcc

SEQ ID NO: 1027 - DNA, 24 bp, synthetic construct
  misc_feature 1..24: note = Description of Artificial Sequence: Synthetic primer
  source 1..24: mol_type = other DNA
tgtttcacaaggcatatttgttgg

SEQ ID NO: 1028 - DNA, 21 bp, synthetic construct
  misc_feature 1..21: note = Description of Artificial Sequence: Synthetic primer
  source 1..21: mol_type = other DNA
agttccaaagcatgaaccacc

SEQ ID NO: 1029 - DNA, 20 bp, synthetic construct
  misc_feature 1..20: note = Description of Artificial Sequence: Synthetic primer
  source 1..20: mol_type = other DNA
gttggtggaagaatgtgggc

SEQ ID NO: 1030 - DNA, 22 bp, synthetic construct
  misc_feature 1..22: note = Description of Artificial Sequence: Synthetic primer
  source 1..22: mol_type = other DNA
ggcattggtgaagtgtctgagc

SEQ ID NO: 1031 - DNA, 24 bp, synthetic construct
  misc_feature 1..24: note = Description of Artificial Sequence: Synthetic primer
  source 1..24: mol_type = other DNA
tgtacgggaaactgaaaaacttcc

SEQ ID NO: 1032 - DNA, 28 bp, synthetic construct
  misc_feature 1..28: note = Description of Artificial Sequence: Synthetic primer
  source 1..28: mol_type = other DNA
ccctttagatgaggtaaaactaacttgc

SEQ ID NO: 1033 - DNA, 21 bp, synthetic construct
  misc_feature 1..21: note = Description of Artificial Sequence: Synthetic primer
  source 1..21: mol_type = other DNA
gcttggatttcatcttcgggc

SEQ ID NO: 1034 - DNA, 23 bp, synthetic construct
  misc_feature 1..23: note = Description of Artificial Sequence: Synthetic primer
  source 1..23: mol_type = other DNA
cgctgaagttcctaaatcgttgc

SEQ ID NO: 1035 - DNA, 27 bp, synthetic construct
  misc_feature 1..27: note = Description of Artificial Sequence: Synthetic primer
  source 1..27: mol_type = other DNA
cctctcattcccaataagtaaactagc

SEQ ID NO: 1036 - DNA, 23 bp, synthetic construct
  misc_feature 1..23: note = Description of Artificial Sequence: Synthetic primer
  source 1..23: mol_type = other DNA
tcctcaaagtacaggagacatcg

SEQ ID NO: 1037 - DNA, 22 bp, synthetic construct
  misc_feature 1..22: note = Description of Artificial Sequence: Synthetic primer
  source 1..22: mol_type = other DNA
ttgatgctattcaacggctagg

SEQ ID NO: 1038 - DNA, 20 bp, synthetic construct
  misc_feature 1..20: note = Description of Artificial Sequence: Synthetic primer
  source 1..20: mol_type = other DNA
cagcaggaacgaagtgaccg

SEQ ID NO: 1039 - DNA, 22 bp, synthetic construct
  misc_feature 1..22: note = Description of Artificial Sequence: Synthetic primer
  source 1..22: mol_type = other DNA
atatgaagcctcccatctatgc

SEQ ID NO: 1040 - DNA, 23 bp, synthetic construct
  misc_feature 1..23: note = Description of Artificial Sequence: Synthetic primer
  source 1..23: mol_type = other DNA
tgggatagacaccaaaaaggtcc

SEQ ID NO: 1041 - DNA, 22 bp, synthetic construct
  misc_feature 1..22: note = Description of Artificial Sequence: Synthetic primer
  source 1..22: mol_type = other DNA
ggtggcgagacattggtttagc

SEQ ID NO: 1042 - DNA, 22 bp, synthetic construct
  misc_feature 1..22: note = Description of Artificial Sequence: Synthetic primer
  source 1..22: mol_type = other DNA
atggattttgtaagcgcaaccc

SEQ ID NO: 1043 - DNA, 26 bp, synthetic construct
  misc_feature 1..26: note = Description of Artificial Sequence: Synthetic primer
  source 1..26: mol_type = other DNA
tatagaaaaacttccagactccatga

SEQ ID NO: 1044 - DNA, 19 bp, synthetic construct
  misc_feature 1..19: note = Description of Artificial Sequence: Synthetic primer
  source 1..19: mol_type = other DNA
taaagggctccatccacgc

SEQ ID NO: 1045 - DNA, 19 bp, synthetic construct
  misc_feature 1..19: note = Description of Artificial Sequence: Synthetic primer
  source 1..19: mol_type = other DNA
gggcaagtttgtgcgaagc

SEQ ID NO: 1046 - DNA, 21 bp, synthetic construct
  misc_feature 1..21: note = Description of Artificial Sequence: Synthetic primer
  source 1..21: mol_type = other DNA
tggcactaccaaagtcatccc

SEQ ID NO: 1047 - DNA, 23 bp, synthetic construct
  misc_feature 1..23: note = Description of Artificial Sequence: Synthetic primer
  source 1..23: mol_type = other DNA
aggacatgacggatcttatgtgg

SEQ ID NO: 1048 - DNA, 20 bp, synthetic construct
  misc_feature 1..20: note = Description of Artificial Sequence: Synthetic primer
  source 1..20: mol_type = other DNA
aggaatggtggtggaaacgc

SEQ ID NO: 1049 - DNA, 21 bp, synthetic construct
  misc_feature 1..21: note = Description of Artificial Sequence: Synthetic primer
  source 1..21: mol_type = other DNA
tccaccaccattcctcaaagc

SEQ ID NO: 1050 - DNA, 22 bp, synthetic construct
  misc_feature 1..22: note = Description of Artificial Sequence: Synthetic primer
  source 1..22: mol_type = other DNA
atgttcttccaagtggggtagg

SEQ ID NO: 1051 - DNA, 20 bp, synthetic construct
  misc_feature 1..20: note = Description of Artificial Sequence: Synthetic primer
  source 1..20: mol_type = other DNA
gaacttggtcaacgctgtgc

SEQ ID NO: 1052 - DNA, 22 bp, synthetic construct
  misc_feature 1..22: note = Description of Artificial Sequence: Synthetic primer
  source 1..22: mol_type = other DNA
acctccttgtctcagtaatcgg

SEQ ID NO: 1053 - DNA, 22 bp, synthetic construct
  misc_feature 1..22: note = Description of Artificial Sequence: Synthetic primer
  source 1..22: mol_type = other DNA
tagtggaagaagacagagaggg

SEQ ID NO: 1054 - DNA, 22 bp, synthetic construct
  misc_feature 1..22: note = Description of Artificial Sequence: Synthetic primer
  source 1..22: mol_type = other DNA
agtgttggctgagaaactgtcc

SEQ ID NO: 1055 - DNA, 20 bp, synthetic construct
  misc_feature 1..20: note = Description of Artificial Sequence: Synthetic primer
  source 1..20: mol_type = other DNA
tctcagccaacactgctacc

SEQ ID NO: 1056 - DNA, 24 bp, synthetic construct
  misc_feature 1..24: note = Description of Artificial Sequence: Synthetic primer
  source 1..24: mol_type = other DNA
gagacttgaacaatttccctttgg

SEQ ID NO: 1057 - DNA, 21 bp, synthetic construct
  misc_feature 1..21: note = Description of Artificial Sequence: Synthetic primer
  source 1..21: mol_type = other DNA
ggtggaaagagcttggtttgg

SEQ ID NO: 1058 - DNA, 21 bp, synthetic construct
  misc_feature 1..21: note = Description of Artificial Sequence: Synthetic primer
  source 1..21: mol_type = other DNA
gagtgagttcgtctagtgtcc

SEQ ID NO: 1059 - DNA, 24 bp, synthetic construct
  misc_feature 1..24: note = Description of Artificial Sequence: Synthetic primer
  source 1..24: mol_type = other DNA
gggaaattaaagagcagttacccg

SEQ ID NO: 1060 - DNA, 22 bp, synthetic construct
  misc_feature 1..22: note = Description of Artificial Sequence: Synthetic primer
  source 1..22: mol_type = other DNA
gggttccatccatgttttctgt

SEQ ID NO: 1061 - DNA, 21 bp, synthetic construct
  misc_feature 1..21: note = Description of Artificial Sequence: Synthetic primer
  source 1..21: mol_type = other DNA
ggtttggttgtgggaagttgc

SEQ ID NO: 1062 - DNA, 21 bp, synthetic construct
  misc_feature 1..21: note = Description of Artificial Sequence: Synthetic primer
  source 1..21: mol_type = other DNA
ctgctgtagaagacacaaggc

SEQ ID NO: 1063 - DNA, 21 bp, synthetic construct
  misc_feature 1..21: note = Description of Artificial Sequence: Synthetic primer
  source 1..21: mol_type = other DNA
gaacgcgattgtgagttctgg

SEQ ID NO: 1064 - DNA, 20 bp, synthetic construct
  misc_feature 1..20: note = Description of Artificial Sequence: Synthetic primer
  source 1..20: mol_type = other DNA
ggcacttcctaagtcatccc

SEQ ID NO: 1065 - DNA, 21 bp, synthetic construct
  misc_feature 1..21: note = Description of Artificial Sequence: Synthetic primer
  source 1..21: mol_type = other DNA
atgggcatgatgggtcttacg

SEQ ID NO: 1066 - DNA, 20 bp, synthetic construct
  misc_feature 1..20: note = Description of Artificial Sequence: Synthetic primer
  source 1..20: mol_type = other DNA
ctccttattgaggcgttccc

SEQ ID NO: 1067 - DNA, 20 bp, synthetic construct
  misc_feature 1..20: note = Description of Artificial Sequence: Synthetic primer
  source 1..20: mol_type = other DNA
gcaagggagcaagtgattcg

SEQ ID NO: 1068 - DNA, 18 bp, synthetic construct
  misc_feature 1..18: note = Description of Artificial Sequence: Synthetic primer
  source 1..18: mol_type = other DNA
ctggaggcttggaaggcg

SEQ ID NO: 1069 - DNA, 23 bp, synthetic construct
  misc_feature 1..23: note = Description of Artificial Sequence: Synthetic primer
  source 1..23: mol_type = other DNA
actcggctactttctcaaagagg

SEQ ID NO: 1070 - DNA, 23 bp, synthetic construct
  misc_feature 1..23: note = Description of Artificial Sequence: Synthetic primer
  source 1..23: mol_type = other DNA
atggattaccaaaacgaggaagc

SEQ ID NO: 1071 - DNA, 24 bp, synthetic construct
  misc_feature 1..24: note = Description of Artificial Sequence: Synthetic primer
  source 1..24: mol_type = other DNA
aggctcatagatagcatccaacgg

SEQ ID NO: 1072 - DNA, 20 bp, synthetic construct
  misc_feature 1..20: note = Description of Artificial Sequence: Synthetic primer
  source 1..20: mol_type = other DNA
gtagccgaaaacgaagcccc

SEQ ID NO: 1073 - DNA, 29 bp, synthetic construct
  misc_feature 1..29: note = Description of Artificial Sequence: Synthetic primer
  source 1..29: mol_type = other DNA
tccttcagatgttgtcagatttcaattcc

SEQ ID NO: 1074 - DNA, 24 bp, synthetic construct
  misc_feature 1..24: note = Description of Artificial Sequence: Synthetic primer
  source 1..24: mol_type = other DNA
gaggtagttggaaagccattatgc

SEQ ID NO: 1075 - DNA, 20 bp, synthetic construct
  misc_feature 1..20: note = Description of Artificial Sequence: Synthetic primer
  source 1..20: mol_type = other DNA
atgctgagcttgtatgaggc

SEQ ID NO: 1076 - DNA, 20 bp, synthetic construct
  misc_feature 1..20: note = Description of Artificial Sequence: Synthetic primer
  source 1..20: mol_type = other DNA
caagaagagcagggcagtgg

SEQ ID NO: 1077 - DNA, 19 bp, synthetic construct
  misc_feature 1..19: note = Description of Artificial Sequence: Synthetic primer
  source 1..19: mol_type = other DNA
gacacctgaggatggcacc

SEQ ID NO: 1078 - DNA, 21 bp, synthetic construct
  misc_feature 1..21: note = Description of Artificial Sequence: Synthetic primer
  source 1..21: mol_type = other DNA
ttgtggagtgactgaagctcg

SEQ ID NO: 1079 - DNA, 20 bp, synthetic construct
  misc_feature 1..20: note = Description of Artificial Sequence: Synthetic primer
  source 1..20: mol_type = other DNA
gtggaaacagttgggtctgg

SEQ ID NO: 1080 - DNA, 22 bp, synthetic construct
  misc_feature 1..22: note = Description of Artificial Sequence: Synthetic primer
  source 1..22: mol_type = other DNA
gtggagttcatccaaagatccg

SEQ ID NO: 1081 - DNA, 21 bp, synthetic construct
  misc_feature 1..21: note = Description of Artificial Sequence: Synthetic primer
  source 1..21: mol_type = other DNA
gatgggatcttggtgcaatgg

SEQ ID NO: 1082 - DNA, 25 bp, synthetic construct
  misc_feature 1..25: note = Description of Artificial Sequence: Synthetic primer
  source 1..25: mol_type = other DNA
acatattttcatgtactcaggaagc

SEQ ID NO: 1083 - DNA, 23 bp, synthetic construct
  misc_feature 1..23: note = Description of Artificial Sequence: Synthetic primer
  source 1..23: mol_type = other DNA
tgaaattggctacagagttctca

SEQ ID NO: 1084 - DNA, 23 bp, synthetic construct
  misc_feature 1..23: note = Description of Artificial Sequence: Synthetic primer
  source 1..23: mol_type = other DNA
agtgttgtgtaacgcataatcca

SEQ ID NO: 1085 - DNA, 24 bp, synthetic construct
  misc_feature 1..24: note = Description of Artificial Sequence: Synthetic primer
  source 1..24: mol_type = other DNA
gcatttctaaccgaagcagaatgg

SEQ ID NO: 1086 - DNA, 21 bp, synthetic construct
  misc_feature 1..21: note = Description of Artificial Sequence: Synthetic primer
  source 1..21: mol_type = other DNA
tggctgttcccaaatcatccc

SEQ ID NO: 1087 - DNA, 26 bp, synthetic construct
  misc_feature 1..26: note = Description of Artificial Sequence: Synthetic primer
  source 1..26: mol_type = other DNA
cactcatttttcctcataggtcatgg

SEQ ID NO: 1088 - DNA, 22 bp, synthetic construct
  misc_feature 1..22: note = Description of Artificial Sequence: Synthetic primer
  source 1..22: mol_type = other DNA
ttggctgttcccaaatcatccc

SEQ ID NO: 1089 - DNA, 23 bp, synthetic construct
  misc_feature 1..23: note = Description of Artificial Sequence: Synthetic primer
  source 1..23: mol_type = other DNA
agagaggagatgttgcttctagc

SEQ ID NO: 1090 - DNA, 20 bp, synthetic construct
  misc_feature 1..20: note = Description of Artificial Sequence: Synthetic primer
  source 1..20: mol_type = other DNA
aaggtcaaaacaggccgtgg

SEQ ID NO: 1091 - DNA, 22 bp, synthetic construct
  misc_feature 1..22: note = Description of Artificial Sequence: Synthetic primer
  source 1..22: mol_type = other DNA
agctcgtggatagagctaaacg

SEQ ID NO: 1092 - DNA, 23 bp, synthetic construct
  misc_feature 1..23: note = Description of Artificial Sequence: Synthetic primer
  source 1..23: mol_type = other DNA
ccatgttgatagatgacttgggc

SEQ ID NO: 1093 - DNA, 21 bp, synthetic construct
  misc_feature 1..21: note = Description of Artificial Sequence: Synthetic primer
  source 1..21: mol_type = other DNA
atgctaccccatccaatgtgc

SEQ ID NO: 1094 - DNA, 28 bp, synthetic construct
  misc_feature 1..28: note = Description of Artificial Sequence: Synthetic primer
  source 1..28: mol_type = other DNA
aatataatcgaaagaccaaatggagggc

SEQ ID NO: 1095 - DNA, 26 bp, synthetic construct
  misc_feature 1..26: note = Description of Artificial Sequence: Synthetic primer
  source 1..26: mol_type = other DNA
ttagttgagatggaaaactctttagc

SEQ ID NO: 1096 - DNA, 22 bp, synthetic construct
  misc_feature 1..22: note = Description of Artificial Sequence: Synthetic primer
  source 1..22: mol_type = other DNA
atagccatgttgacgtagaagc

SEQ ID NO: 1097 - DNA, 20 bp, synthetic construct
  misc_feature 1..20: note = Description of Artificial Sequence: Synthetic primer
  source 1..20: mol_type = other DNA
tcccacttcatcggaggacc

SEQ ID NO: 1098 - DNA, 23 bp, synthetic construct
  misc_feature 1..23: note = Description of Artificial Sequence: Synthetic primer
  source 1..23: mol_type = other DNA
ttggctaactcaagcaacatagg

SEQ ID NO: 1099 - DNA, 25 bp, synthetic construct
  misc_feature 1..25: note = Description of Artificial Sequence: Synthetic primer
  source 1..25: mol_type = other DNA
ggtggagacatactaaacttggaga

SEQ ID NO: 1100 - DNA, 25 bp, synthetic construct
  misc_feature 1..25: note = Description of Artificial Sequence: Synthetic primer
  source 1..25: mol_type = other DNA
gctttggtgaaaagctctaattcat

SEQ ID NO: 1101 - DNA, 27 bp, synthetic construct
  misc_feature 1..27: note = Description of Artificial Sequence: Synthetic primer
  source 1..27: mol_type = other DNA
atgagttaccagaatacatgaagatgc

SEQ ID NO: 1102 - DNA, 29 bp, synthetic construct
  misc_feature 1..29: note = Description of Artificial Sequence: Synthetic primer
  source 1..29: mol_type = other DNA
ggtattgaatgttgatggagatttcttgg

SEQ ID NO: 1103 - DNA, 26 bp, synthetic construct
  misc_feature 1..26: note = Description of Artificial Sequence: Synthetic primer
  source 1..26: mol_type = other DNA
ggtcgatatgtgtaaaagtttcttgc

SEQ ID NO: 1104 - DNA, 22 bp, synthetic construct
  misc_feature 1..22: note = Description of Artificial Sequence: Synthetic primer
  source 1..22: mol_type = other DNA
actggtgctcctactgaaatcc

SEQ ID NO: 1105 - DNA, 23 bp, synthetic construct
  misc_feature 1..23: note = Description of Artificial Sequence: Synthetic primer
  source 1..23: mol_type = other DNA
aatggttggatttcagtaggagc

SEQ ID NO: 1106 - DNA, 21 bp, synthetic construct
  misc_feature 1..21: note = Description of Artificial Sequence: Synthetic primer
  source 1..21: mol_type = other DNA
tggcactgtgacgaataatgg

SEQ ID NO: 1107 - DNA, 22 bp, synthetic construct
  misc_feature 1..22: note = Description of Artificial Sequence: Synthetic primer
  source 1..22: mol_type = other DNA
attgaaaagaggtgatgctccg

SEQ ID NO: 1108 - DNA, 29 bp, synthetic construct
  misc_feature 1..29: note = Description of Artificial Sequence: Synthetic primer
  source 1..29: mol_type = other DNA
ttggattgattatcttgagaactatgacc

SEQ ID NO: 1109 - DNA, 23 bp, synthetic construct
  misc_feature 1..23: note = Description of Artificial Sequence: Synthetic primer
  source 1..23: mol_type = other DNA
attgtatctgaagaggaagctcg

SEQ ID NO: 1110 - DNA, 28 bp, synthetic construct
  misc_feature 1..28: note = Description of Artificial Sequence: Synthetic primer
  source 1..28: mol_type = other DNA
tataagggaataggttcaataatcaagg

SEQ ID NO: 1111 - DNA, 22 bp, synthetic construct
  misc_feature 1..22: note = Description of Artificial Sequence: Synthetic primer
  source 1..22: mol_type = other DNA
atgtgctgtggtcaatagttct

SEQ ID NO: 1112 - DNA, 21 bp, synthetic construct
  misc_feature 1..21: note = Description of Artificial Sequence: Synthetic primer
  source 1..21: mol_type = other DNA
aaagaccaaatggagggctca

SEQ ID NO: 1113 - DNA, 22 bp, synthetic construct
  misc_feature 1..22: note = Description of Artificial Sequence: Synthetic primer
  source 1..22: mol_type = other DNA
acaggtcgagtcaaagaattgg

SEQ ID NO: 1114 - DNA, 20 bp, synthetic construct
  misc_feature 1..20: note = Description of Artificial Sequence: Synthetic primer
  source 1..20: mol_type = other DNA
gccatgttgacgtagaagcc

SEQ ID NO: 1115 - DNA, 21 bp, synthetic construct
  misc_feature 1..21: note = Description of Artificial Sequence: Synthetic primer
  source 1..21: mol_type = other DNA
ctcccacttcattggaggact

SEQ ID NO: 1116 - DNA, 24 bp, synthetic construct
  misc_feature 1..24: note = Description of Artificial Sequence: Synthetic primer
  source 1..24: mol_type = other DNA
agcaaactcaagcaaaataggatt

SEQ ID NO: 1117 - DNA, 20 bp, synthetic construct
  misc_feature 1..20: note = Description of Artificial Sequence: Synthetic primer
  source 1..20: mol_type = other DNA
gctaagtggttcatcgacgc

SEQ ID NO: 1118 - DNA, 25 bp, synthetic construct
  misc_feature 1..25: note = Description of Artificial Sequence: Synthetic primer
  source 1..25: mol_type = other DNA
tgatgtgttgattgtatcatgttga

SEQ ID NO: 1119 - DNA, 22 bp, synthetic construct
  misc_feature 1..22: note = Description of Artificial Sequence: Synthetic primer
  source 1..22: mol_type = other DNA
ggtggaggcatactaaacttgg

SEQ ID NO: 1120 - DNA, 27 bp, synthetic construct
  misc_feature 1..27: note = Description of Artificial Sequence: Synthetic primer
  source 1..27: mol_type = other DNA
gaaaagctctaattcatccaatgttcc

SEQ ID NO: 1121 - DNA, 27 bp, synthetic construct
  misc_feature 1..27: note = Description of Artificial Sequence: Synthetic primer
  source 1..27: mol_type = other DNA
gatgggatatggaaatgataaatgagt

SEQ ID NO: 1122 - DNA, 23 bp, synthetic construct
  misc_feature 1..23: note = Description of Artificial Sequence: Synthetic primer
  source 1..23: mol_type = other DNA
tgttgatggagatgtgttggtct

SEQ ID NO: 1123 - DNA, 19 bp, synthetic construct
  misc_feature 1..19: note = Description of Artificial Sequence: Synthetic primer
  source 1..19: mol_type = other DNA
gatttcagtgggagcaccg

SEQ ID NO: 1124 - DNA, 21 bp, synthetic construct
  misc_feature 1..21: note = Description of Artificial Sequence: Synthetic primer
  source 1..21: mol_type = other DNA
actatgacgaattatggcggg

SEQ ID NO: 1125 - DNA, 23 bp, synthetic construct
  misc_feature 1..23: note = Description of Artificial Sequence: Synthetic primer
  source 1..23: mol_type = other DNA
gaactgaaaagaggtgatgctcc

SEQ ID NO: 1126 - DNA, 30 bp, synthetic construct; identical to SEQ ID NO: 472
  misc_feature 1..30: note = Description of Artificial Sequence: Synthetic primer
  source 1..30: mol_type = other DNA

SEQ ID NO: 1127 - DNA, 21 bp, synthetic construct
  misc_feature 1..21: note = Description of Artificial Sequence: Synthetic primer
  source 1..21: mol_type = other DNA
atgctaccccatccaatgtgc

SEQ ID NO: 1128 - DNA, 28 bp, synthetic construct
  misc_feature 1..28: note = Description of Artificial Sequence: Synthetic primer
  source 1..28: mol_type = other DNA
aatataatcaaaagaccaaatggagggc

SEQ ID NO: 1129 - DNA, 25 bp, synthetic construct
  misc_feature 1..25: note = Description of Artificial Sequence: Synthetic primer
  source 1..25: mol_type = other DNA
caacttgaactcattgatacattgc

SEQ ID NO: 1130 - DNA, 22 bp, synthetic construct
  misc_feature 1..22: note = Description of Artificial Sequence: Synthetic primer
  source 1..22: mol_type = other DNA
tagccatgttgacgtagaagcc

SEQ ID NO: 1131 - DNA, 20 bp, synthetic construct
  misc_feature 1..20: note = Description of Artificial Sequence: Synthetic primer
  source 1..20: mol_type = other DNA
agctcccacttcatcggagg

SEQ ID NO: 1132 - DNA, 24 bp, synthetic construct
  misc_feature 1..24: note = Description of Artificial Sequence: Synthetic primer
  source 1..24: mol_type = other DNA
tttggctaactcaagcaacatagg

SEQ ID NO: 1133 - DNA, 25 bp, synthetic construct
  misc_feature 1..25: note = Description of Artificial Sequence: Synthetic primer
  source 1..25: mol_type = other DNA
ggtggagacatactaaacttggaga

SEQ ID NO: 1134 - DNA, 25 bp, synthetic construct
  misc_feature 1..25: note = Description of Artificial Sequence: Synthetic primer
  source 1..25: mol_type = other DNA
gctttggtgaaaagctctaattcat

SEQ ID NO: 1135 - DNA, 25 bp, synthetic construct
  misc_feature 1..25: note = Description of Artificial Sequence: Synthetic primer
  source 1..25: mol_type = other DNA
agttaccagaatacatgaagatgcc

SEQ ID NO: 1136 - DNA, 24 bp, synthetic construct
  misc_feature 1..24: note = Description of Artificial Sequence: Synthetic primer
  source 1..24: mol_type = other DNA
ttcttggtctcttaacacctcaaa

SEQ ID NO: 1137 - DNA, 26 bp, synthetic construct
  misc_feature 1..26: note = Description of Artificial Sequence: Synthetic primer
  source 1..26: mol_type = other DNA
ggtcgatatgtgtaaaagtttcttgc

SEQ ID NO: 1138 - DNA, 22 bp, synthetic construct
  misc_feature 1..22: note = Description of Artificial Sequence: Synthetic primer
  source 1..22: mol_type = other DNA
actggtgctcctactgaaatcc

SEQ ID NO: 1139 - DNA, 26 bp, synthetic construct
  misc_feature 1..26: note = Description of Artificial Sequence: Synthetic primer
  source 1..26: mol_type = other DNA
gaaaatggttggatttcagtaggagc

SEQ ID NO: 1140 - DNA, 22 bp, synthetic construct
  misc_feature 1..22: note = Description of Artificial Sequence: Synthetic primer
  source 1..22: mol_type = other DNA
tggcactgtgacgaataatggc

SEQ ID NO: 1141 - DNA, 23 bp, synthetic construct
  misc_feature 1..23: note = Description of Artificial Sequence: Synthetic primer
  source 1..23: mol_type = other DNA
aattgaaaagaggtgatgctccg

SEQ ID NO: 1142 - DNA, 30 bp, synthetic construct; identical to SEQ ID NO: 472
  misc_feature 1..30: note = Description of Artificial Sequence: Synthetic primer
  source 1..30: mol_type = other DNA

SEQ ID NO: 1143 - DNA, 23 bp, synthetic construct
  misc_feature 1..23: note = Description of Artificial Sequence: Synthetic primer
  source 1..23: mol_type = other DNA
agtcaagtgttagcttcatctca

SEQ ID NO: 1144 - DNA, 20 bp, synthetic construct
  misc_feature 1..20: note = Description of Artificial Sequence: Synthetic primer
  source 1..20: mol_type = other DNA
cgccccaaatagaagggtga

SEQ ID NO: 1145 - DNA, 25 bp, synthetic construct
  misc_feature 1..25: note = Description of Artificial Sequence: Synthetic primer
  source 1..25: mol_type = other DNA
gagagtgaaattgagaaattgttgg

SEQ ID NO: 1146 - DNA, 29 bp, synthetic construct
  misc_feature 1..29: note = Description of Artificial Sequence: Synthetic primer
  source 1..29: mol_type = other DNA
tgtcttaataatctaaaccaaagagaagc

SEQ ID NO: 1147 - DNA, 19 bp, synthetic construct
  misc_feature 1..19: note = Description of Artificial Sequence: Synthetic primer
  source 1..19: mol_type = other DNA
tgataaccgacgtttcggg

SEQ ID NO: 1148 - DNA, 22 bp, synthetic construct
  misc_feature 1..22: note = Description of Artificial Sequence: Synthetic primer
  source 1..22: mol_type = other DNA
ctagcatgaagcctctctaagg

SEQ ID NO: 1149 - DNA, 22 bp, synthetic construct
  misc_feature 1..22: note = Description of Artificial Sequence: Synthetic primer
  source 1..22: mol_type = other DNA
ggaaaggccactaagaatgacc

SEQ ID NO: 1150 - DNA, 23 bp, synthetic construct
  misc_feature 1..23: note = Description of Artificial Sequence: Synthetic primer
  source 1..23: mol_type = other DNA
acctcacaatttcactaagctcc

SEQ ID NO: 1151 - DNA, 21 bp, synthetic construct
  misc_feature 1..21: note = Description of Artificial Sequence: Synthetic primer
  source 1..21: mol_type = other DNA
gtggaaggagcatgagtttgc

SEQ ID NO: 1152 - DNA, 25 bp, synthetic construct
  misc_feature 1..25: note = Description of Artificial Sequence: Synthetic primer
  source 1..25: mol_type = other DNA
tgactttggttagaagttttcttgc

SEQ ID NO: 1153 - DNA, 26 bp, synthetic construct
  misc_feature 1..26: note = Description of Artificial Sequence: Synthetic primer
  source 1..26: mol_type = other DNA
gaagaagctcgatggttaaatgaagg

SEQ ID NO: 1154 - DNA, 25 bp, synthetic construct
  misc_feature 1..25: note = Description of Artificial Sequence: Synthetic primer
  source 1..25: mol_type = other DNA
agtagaagctgaaacaatcttaggg

SEQ ID NO: 1155 - DNA, 23 bp, synthetic construct
  misc_feature 1..23: note = Description of Artificial Sequence: Synthetic primer
  source 1..23: mol_type = other DNA
tctggttacgttttgttgatagc

SEQ ID NO: 1156 - DNA, 25 bp, synthetic construct
  misc_feature 1..25: note = Description of Artificial Sequence: Synthetic primer
  source 1..25: mol_type = other DNA
tgaatcttgagaggagagtagaagc

SEQ ID NO: 1157 - DNA, 24 bp, synthetic construct
  misc_feature 1..24: note = Description of Artificial Sequence: Synthetic primer
  source 1..24: mol_type = other DNA
tgaagcaatatgaggtttcagagg

SEQ ID NO: 1158 - DNA, 25 bp, synthetic construct
  misc_feature 1..25: note = Description of Artificial Sequence: Synthetic primer
  source 1..25: mol_type = other DNA
atgggatgggatctataagtaaagc

SEQ ID NO: 1159 - DNA, 29 bp, synthetic construct
  misc_feature 1..29: note = Description of Artificial Sequence: Synthetic primer
  source 1..29: mol_type = other DNA
aagtcttagcttcatctcaattatgtgac

SEQ ID NO: 1160 - DNA, 22 bp, synthetic construct
  misc_feature 1..22: note = Description of Artificial Sequence: Synthetic primer
  source 1..22: mol_type = other DNA
tcgatcaccccaaatagaaggg

SEQ ID NO: 1161 - DNA, 26 bp, synthetic construct
  misc_feature 1..26: note = Description of Artificial Sequence: Synthetic primer
  source 1..26: mol_type = other DNA
cgagagtgaaatcgagaaattattgg

SEQ ID NO: 1162 - DNA, 25 bp, synthetic construct
  misc_feature 1..25: note = Description of Artificial Sequence: Synthetic primer
  source 1..25: mol_type = other DNA
cactttgtcttaatagtctgaaccg

SEQ ID NO: 1163 - DNA, 19 bp, synthetic construct
  misc_feature 1..19: note = Description of Artificial Sequence: Synthetic primer
  source 1..19: mol_type = other DNA
agcttgtatgaggcttcgc

SEQ ID NO: 1164 - DNA, 24 bp, synthetic construct
  misc_feature 1..24: note = Description of Artificial Sequence: Synthetic primer
  source 1..24: mol_type = other DNA
tctctatggtctttcttaatggcg

SEQ ID NO: 1165 - DNA, 27 bp, synthetic construct
  misc_feature 1..27: note = Description of Artificial Sequence: Synthetic primer
  source 1..27: mol_type = other DNA
ggtggaactgtatttttggatattggg

SEQ ID NO: 1166 - DNA, 26 bp, synthetic construct
  misc_feature 1..26: note = Description of Artificial Sequence: Synthetic primer
  source 1..26: mol_type = other DNA
acctttgaattgctttggtaagaagc

SEQ ID NO: 1167 - DNA, 23 bp, synthetic construct
  misc_feature 1..23: note = Description of Artificial Sequence: Synthetic primer
  source 1..23: mol_type = other DNA
gaagctcgatggttgaatgaagg

SEQ ID NO: 1168 - DNA, 19 bp, synthetic construct
  misc_feature 1..19: note = Description of Artificial Sequence: Synthetic primer
  source 1..19: mol_type = other DNA
gcgagagcctatgtcatcc

SEQ ID NO: 1169 - DNA, 24 bp, synthetic construct
  misc_feature 1..24: note = Description of Artificial Sequence: Synthetic primer
  source 1..24: mol_type = other DNA
tgtggttacgttatgttgatagcc

SEQ ID NO: 1170 - DNA, 23 bp, synthetic construct
  misc_feature 1..23: note = Description of Artificial Sequence: Synthetic primer
  source 1..23: mol_type = other DNA
aatcttgataggagagtggaagc

SEQ ID NO: 1171 - DNA, 27 bp, synthetic construct
  misc_feature 1..27: note = Description of Artificial Sequence: Synthetic primer
  source 1..27: mol_type = other DNA
gtttgagcaagagagaaatcacatacc

SEQ ID NO: 1172 - DNA, 30 bp, synthetic construct
  misc_feature 1..30: note = Description of Artificial Sequence: Synthetic primer
  source 1..30: mol_type = other DNA
tgtaaaattaagaacacgaactaagatagg

SEQ ID NO: 1173 - DNA, 28 bp, synthetic construct
  misc_feature 1..28: note = Description of Artificial Sequence: Synthetic primer
  source 1..28: mol_type = other DNA
tcaagtcttagcttcatctcaattatgt

SEQ ID NO: 1174 - DNA, 21 bp, synthetic construct
  misc_feature 1..21: note = Description of Artificial Sequence: Synthetic primer
  source 1..21: mol_type = other DNA
tcgatcaccccaaatagaagg

SEQ ID NO: 1175 - DNA, 28 bp, synthetic construct
  misc_feature 1..28: note = Description of Artificial Sequence: Synthetic primer
  source 1..28: mol_type = other DNA
tttgagagtgaaattgagaaattgttgg

SEQ ID NO: 1176 - DNA, 30 bp, synthetic construct; identical to SEQ ID NO: 166
  misc_feature 1..30: note = Description of Artificial Sequence: Synthetic primer
  source 1..30: mol_type = other DNA

SEQ ID NO: 1177 - DNA, 27 bp, synthetic construct
  misc_feature 1..27: note = Description of Artificial Sequence: Synthetic primer
  source 1..27: mol_type = other DNA
gacgctgaaggtaattttaagaaaagc

SEQ ID NO: 1178 - DNA, 21 bp, synthetic construct
  misc_feature 1..21: note = Description of Artificial Sequence: Synthetic primer
  source 1..21: mol_type = other DNA
aaggtgagtggttgtgaaagc

SEQ ID NO: 1179 - DNA, 23 bp, synthetic construct
  misc_feature 1..23: note = Description of Artificial Sequence: Synthetic primer
  source 1..23: mol_type = other DNA
gcttcacacttgagttatgttgg

SEQ ID NO: 1180 - DNA, 24 bp, synthetic construct
  misc_feature 1..24: note = Description of Artificial Sequence: Synthetic primer
  source 1..24: mol_type = other DNA
ctctctatggtctttcttagaggc

SEQ ID NO: 1181 - DNA, 24 bp, synthetic construct
  misc_feature 1..24: note = Description of Artificial Sequence: Synthetic primer
  source 1..24: mol_type = other DNA
aggatggtggaactgtatttttgg

SEQ ID NO: 1182 - DNA, 25 bp, synthetic construct
  misc_feature 1..25: note = Description of Artificial Sequence: Synthetic primer
  source 1..25: mol_type = other DNA
cctttgaattgctttggtaagaagc

SEQ ID NO: 1183 - DNA, 26 bp, synthetic construct
  misc_feature 1..26: note = Description of Artificial Sequence: Synthetic primer
  source 1..26: mol_type = other DNA
gaagaagctcgatggttgaatgaagg

SEQ ID NO: 1184 - DNA, 26 bp, synthetic construct
  misc_feature 1..26: note = Description of Artificial Sequence: Synthetic primer
  source 1..26: mol_type = other DNA
agagtggaagctgaaacaatcttagg

SEQ ID NO: 1185 - DNA, 24 bp, synthetic construct
  misc_feature 1..24: note = Description of Artificial Sequence: Synthetic primer
  source 1..24: mol_type = other DNA
tgagcaacagagaaatcacatacc

SEQ ID NO: 1186 - DNA, 26 bp, synthetic construct
  misc_feature 1..26: note = Description of Artificial Sequence: Synthetic primer
  source 1..26: mol_type = other DNA
gaacacgaagtaagataggaaaaggc

SEQ ID NO: 1187 - DNA, 23 bp, synthetic construct
  misc_feature 1..23: note = Description of Artificial Sequence: Synthetic primer
  source 1..23: mol_type = other DNA
gtgccttttcctatcttacttcg

SEQ ID NO: 1188 - DNA, 25 bp, synthetic construct
  misc_feature 1..25: note = Description of Artificial Sequence: Synthetic primer
  source 1..25: mol_type = other DNA
caatgctttctttgagcacttttcc

SEQ ID NO: 1189 - DNA, 28 bp, synthetic construct
  misc_feature 1..28: note = Description of Artificial Sequence: Synthetic primer
  source 1..28: mol_type = other DNA
tttgagagtgaaattgagaaattgttgg

SEQ ID NO: 1190 - DNA, 30 bp, synthetic construct; identical to SEQ ID NO: 166
  misc_feature 1..30: note = Description of Artificial Sequence: Synthetic primer
  source 1..30: mol_type = other DNA

SEQ ID NO: 1191 - DNA, 22 bp, synthetic construct
  misc_feature 1..22: note = Description of Artificial Sequence: Synthetic primer
  source 1..22: mol_type = other DNA
gcttgataaccgatgtttcggg

SEQ ID NO: 1192 - DNA, 21 bp, synthetic construct
  misc_feature 1..21: note = Description of Artificial Sequence: Synthetic primer
  source 1..21: mol_type = other DNA
gaggtgagtggttgtgaaagc

SEQ ID NO: 1193 - DNA, 21 bp, synthetic construct
  misc_feature 1..21: note = Description of Artificial Sequence: Synthetic primer
  source 1..21: mol_type = other DNA
tcacctcaaggctattgtggc

SEQ ID NO: 1194 - DNA, 24 bp, synthetic construct
  misc_feature 1..24: note = Description of Artificial Sequence: Synthetic primer
  source 1..24: mol_type = other DNA
agatgtaaaacctagcatgaagcc

SEQ ID NO: 1195 - DNA, 22 bp, synthetic construct
  misc_feature 1..22: note = Description of Artificial Sequence: Synthetic primer
  source 1..22: mol_type = other DNA
ggtggaaggagcatgagtttgc

SEQ ID NO: 1196 - DNA, 24 bp, synthetic construct
  misc_feature 1..24: note = Description of Artificial Sequence: Synthetic primer
  source 1..24: mol_type = other DNA
ttgaggctaatgcaatgactttgg

SEQ ID NO: 1197 - DNA, 28 bp, synthetic construct
  misc_feature 1..28: note = Description of Artificial Sequence: Synthetic primer
  source 1..28: mol_type = other DNA
gggacataaattgtctggataaacttga

SEQ ID NO: 1198 - DNA, 30 bp, synthetic construct
  misc_feature 1..30: note = Description of Artificial Sequence: Synthetic primer
  source 1..30: mol_type = other DNA
tttttaagctccttttcaaattcttcataa

SEQ ID NO: 1199 - DNA, 21 bp, synthetic construct
  misc_feature 1..21: note = Description of Artificial Sequence: Synthetic primer
  source 1..21: mol_type = other DNA
agctcgatggttgagtgaagg

SEQ ID NO: 1200 - DNA, 22 bp, synthetic construct
  misc_feature 1..22: note = Description of Artificial Sequence: Synthetic primer
  source 1..22: mol_type = other DNA
acctagcaagtagagtggaagc

SEQ ID NO: 1201 - DNA, 24 bp, synthetic construct
  misc_feature 1..24: note = Description of Artificial Sequence: Synthetic primer
  source 1..24: mol_type = other DNA
tgagcaaaagagaaatcacatacc

SEQ ID NO: 1202 - DNA, 20 bp, synthetic construct
  misc_feature 1..20: note = Description of Artificial Sequence: Synthetic primer
  source 1..20: mol_type = other DNA
tttctttccagtgggtgtcc

SEQ ID NO: 1203 - DNA, 23 bp, synthetic construct
  misc_feature 1..23: note = Description of Artificial Sequence: Synthetic primer
  source 1..23: mol_type = other DNA
tatggggtatcagagaaagaggc

SEQ ID NO: 1204 - DNA, 26 bp, synthetic construct
  misc_feature 1..26: note = Description of Artificial Sequence: Synthetic primer
  source 1..26: mol_type = other DNA
gaacacgaactaagataggaaaaggc

SEQ ID NO: 1205 - DNA, 23 bp, synthetic construct
  misc_feature 1..23: note = Description of Artificial Sequence: Synthetic primer
  source 1..23: mol_type = other DNA
gtgccttttcctatcttagttcg

SEQ ID NO: 1206 - DNA, 25 bp, synthetic construct
  misc_feature 1..25: note = Description of Artificial Sequence: Synthetic primer
  source 1..25: mol_type = other DNA
caatgctttctttgagcacttttcc

SEQ ID NO: 1207 - DNA, 23 bp, synthetic construct
  misc_feature 1..23: note = Description of Artificial Sequence: Synthetic primer
  source 1..23: mol_type = other DNA
tccactcaaatcttagcaacctc

SEQ ID NO: 1208 - DNA, 20 bp, synthetic construct
  misc_feature 1..20: note = Description of Artificial Sequence: Synthetic primer
  source 1..20: mol_type = other DNA
tgcaaaaatcggtctcccca

SEQ ID NO: 1209 - DNA, 25 bp, synthetic construct
  misc_feature 1..25: note = Description of Artificial Sequence: Synthetic primer
  source 1..25: mol_type = other DNA
tgaagttaattgatgtggtagaacg

SEQ ID NO: 1210 - DNA, 24 bp, synthetic construct
  misc_feature 1..24: note = Description of Artificial Sequence: Synthetic primer
  source 1..24: mol_type = other DNA
agaaaccctatatccatgttgtcg

SEQ ID NO: 1211 - DNA, 25 bp, synthetic construct
  misc_feature 1..25: note = Description of Artificial Sequence: Synthetic primer
  source 1..25: mol_type = other DNA
caagttgaagaattgaaagaagtgg

SEQ ID NO: 1212 - DNA, 23 bp, synthetic construct
  misc_feature 1..23: note = Description of Artificial Sequence: Synthetic primer
  source 1..23: mol_type = other DNA
aaatgataggacaatcccaaacg

SEQ ID NO: 1213 - DNA, 19 bp, synthetic construct
  misc_feature 1..19: note = Description of Artificial Sequence: Synthetic primer
  source 1..19: mol_type = other DNA
gcgagtgacaccgttggtt

SEQ ID NO: 1214 - DNA, 24 bp, synthetic construct
  misc_feature 1..24: note = Description of Artificial Sequence: Synthetic primer
  source 1..24: mol_type = other DNA
tggatcatcattggggtgttcttt

SEQ ID NO: 1215 - DNA, 23 bp, synthetic construct
  misc_feature 1..23: note = Description of Artificial Sequence: Synthetic primer
  source 1..23: mol_type = other DNA
aaagaacaccccaatgatgatcc

SEQ ID NO: 1216 - DNA, 20 bp, synthetic construct
  misc_feature 1..20: note = Description of Artificial Sequence: Synthetic primer
  source 1..20: mol_type = other DNA
gggtctttcttaagggcctc

SEQ ID NO: 1217 - DNA, 23 bp, synthetic construct
  misc_feature 1..23: note = Description of Artificial Sequence: Synthetic primer
  source 1..23: mol_type = other DNA
tggtggaaggaattagacagtgc

SEQ ID NO: 1218 - DNA, 21 bp, synthetic construct
  misc_feature 1..21: note = Description of Artificial Sequence: Synthetic primer
  source 1..21: mol_type = other DNA
atcagcgattgaggaaagtgc

SEQ ID NO: 1219 - DNA, 25 bp, synthetic construct
  misc_feature 1..25: note = Description of Artificial Sequence: Synthetic primer
  source 1..25: mol_type = other DNA
gataaactccatccagaatacttgc

SEQ ID NO: 1220 - DNA, 25 bp, synthetic construct
  misc_feature 1..25: note = Description of Artificial Sequence: Synthetic primer
  source 1..25: mol_type = other DNA
actttgtaagtttcctccttttcaa

SEQ ID NO: 1221 - DNA, 23 bp, synthetic construct
  misc_feature 1..23: note = Description of Artificial Sequence: Synthetic primer
  source 1..23: mol_type = other DNA
gaagctcgatggttgaatgaagg

SEQ ID NO: 1222 - DNA, 21 bp, synthetic construct
  misc_feature 1..21: note = Description of Artificial Sequence: Synthetic primer
  source 1..21: mol_type = other DNA
cgcttgccctaacaatcttgg

SEQ ID NO: 1223 - DNA, 24 bp, synthetic construct
  misc_feature 1..24: note = Description of Artificial Sequence: Synthetic primer
  source 1..24: mol_type = other DNA
gttgatggcttgctctttagttgg

SEQ ID NO: 1224 - DNA, 20 bp, synthetic construct
  misc_feature 1..20: note = Description of Artificial Sequence: Synthetic primer
  source 1..20: mol_type = other DNA
tgtgaccagccacgtcatcc

SEQ ID NO: 1225 - DNA, 25 bp, synthetic construct
  misc_feature 1..25: note = Description of Artificial Sequence: Synthetic primer
  source 1..25: mol_type = other DNA
tgtgatgaaatgaataggcgagtgg

SEQ ID NO: 1226 - DNA, 25 bp, synthetic construct
  misc_feature 1..25: note = Description of Artificial Sequence: Synthetic primer
  source 1..25: mol_type = other DNA
ccataaccctagcaagattcagagc

SEQ ID NO: 1227 - DNA, 24 bp, synthetic construct
  misc_feature 1..24: note = Description of Artificial Sequence: Synthetic primer
  source 1..24: mol_type = other DNA
tcaagttttagcctcatcacaaaa

SEQ ID NO: 1228 - DNA, 25 bp, synthetic construct
  misc_feature 1..25: note = Description of Artificial Sequence: Synthetic primer
  source 1..25: mol_type = other DNA
cccaaatagaaggttgataagttgt

SEQ ID NO: 1229 - DNA, 23 bp, synthetic construct
  misc_feature 1..23: note = Description of Artificial Sequence: Synthetic primer
  source 1..23: mol_type = other DNA
gcagcgagttgacgaattaaagg

SEQ ID NO: 1230 - DNA, 23 bp, synthetic construct
  misc_feature 1..23: note = Description of Artificial Sequence: Synthetic primer
  source 1..23: mol_type = other DNA
tgaaaccataaatccatgttggc

SEQ ID NO: 1231 - DNA, 22 bp, synthetic construct
  misc_feature 1..22: note = Description of Artificial Sequence: Synthetic primer
  source 1..22: mol_type = other DNA
tgcttgataactgacattcccg

SEQ ID NO: 1232 - DNA, 21 bp, synthetic construct
  misc_feature 1..21: note = Description of Artificial Sequence: Synthetic primer
  source 1..21: mol_type = other DNA
aaggtgagtggtggtgaaagc

SEQ ID NO: 1233 - DNA, 23 bp, synthetic construct
  misc_feature 1..23: note = Description of Artificial Sequence: Synthetic primer
  source 1..23: mol_type = other DNA
agtgcttgataactgacattccc

SEQ ID NO: 1234 - DNA, 23 bp, synthetic construct
  misc_feature 1..23: note = Description of Artificial Sequence: Synthetic primer
  source 1..23: mol_type = other DNA
atgaaatgtaatgcctagcgtgg

SEQ ID NO: 1235 - DNA, 23 bp, synthetic construct
  misc_feature 1..23: note = Description of Artificial Sequence: Synthetic primer
  source 1..23: mol_type = other DNA
tgcaagagataggattgtggagc

SEQ ID NO: 1236 - DNA, 20 bp, synthetic construct
  misc_feature 1..20: note = Description of Artificial Sequence: Synthetic primer
  source 1..20: mol_type = other DNA
tctgcaactgaggccaatgc

SEQ ID NO: 1237 - DNA, 25 bp, synthetic construct
  misc_feature 1..25: note = Description of Artificial Sequence: Synthetic primer
  source 1..25: mol_type = other DNA
acttaaattgtgcggatcaactacg

SEQ ID NO: 1238 - DNA, 27 bp, synthetic construct
  misc_feature 1..27: note = Description of Artificial Sequence: Synthetic primer
  source 1..27: mol_type = other DNA
gtaaactttgtaactttcctcctttcc

SEQ ID NO: 1239 - DNA, 21 bp, synthetic construct
  misc_feature 1..21: note = Description of Artificial Sequence: Synthetic primer
  source 1..21: mol_type = other DNA
tcagtgaagctcgatggttgc

SEQ ID NO: 1240 - DNA, 23 bp, synthetic construct
  misc_feature 1..23: note = Description of Artificial Sequence: Synthetic primer
  source 1..23: mol_type = other DNA
tgcaatctctcattatcttgggg

SEQ ID NO: 1241 - DNA, 21 bp, synthetic construct
  misc_feature 1..21: note = Description of Artificial Sequence: Synthetic primer
  source 1..21: mol_type = other DNA
gagatcattcaccgtctaccg

SEQ ID NO: 1242 - DNA, 24 bp, synthetic construct
  misc_feature 1..24: note = Description of Artificial Sequence: Synthetic primer
  source 1..24: mol_type = other DNA
tttttgtctcttttccaacatgcg

SEQ ID NO: 1243 - DNA, 23 bp, synthetic construct
  misc_feature 1..23: note = Description of Artificial Sequence: Synthetic primer
  source 1..23: mol_type = other DNA
tgtcgtctcaaatcttagcaacc

SEQ ID NO: 1244 - DNA, 20 bp, synthetic construct
  misc_feature 1..20: note = Description of Artificial Sequence: Synthetic primer
  source 1..20: mol_type = other DNA
atgcaaaaatcggtctcccc

SEQ ID NO: 1245 - DNA, 27 bp, synthetic construct
  misc_feature 1..27: note = Description of Artificial Sequence: Synthetic primer
  source 1..27: mol_type = other DNA
gccaagttgaagaattgaaagaagtgg

SEQ ID NO: 1246 - DNA, 25 bp, synthetic construct
  misc_feature 1..25: note = Description of Artificial Sequence: Synthetic primer
  source 1..25: mol_type = other DNA
actctcaaaatgataggacaatccc

SEQ ID NO: 1247 - DNA, 27 bp, synthetic construct
  misc_feature 1..27: note = Description of Artificial Sequence: Synthetic primer
  source 1..27: mol_type = other DNA
agaagtggtaagaaaggagatatttgg

SEQ ID NO: 1248 - DNA, 25 bp, synthetic construct
  misc_feature 1..25: note = Description of Artificial Sequence: Synthetic primer
  source 1..25: mol_type = other DNA
aagaaaccctatatccatgttgtcg

SEQ ID NO: 1249 - DNA, 21 bp, synthetic construct
  misc_feature 1..21: note = Description of Artificial Sequence: Synthetic primer
  source 1..21: mol_type = other DNA
gaatgtttggcgagtgacacc

SEQ ID NO: 1250 - DNA, 20 bp, synthetic construct
  misc_feature 1..20: note = Description of Artificial Sequence: Synthetic primer
  source 1..20: mol_type = other DNA
aagggcctctctagggctcg

SEQ ID NO: 1251 - DNA, 22 bp, synthetic construct
  misc_feature 1..22: note = Description of Artificial Sequence: Synthetic primer
  source 1..22: mol_type = other DNA
aagaacaccccaatgatgatcc

SEQ ID NO: 1252 - DNA, 23 bp, synthetic construct
  misc_feature 1..23: note = Description of Artificial Sequence: Synthetic primer
  source 1..23: mol_type = other DNA
actaagctcctttttgtgcatgg

SEQ ID NO: 1253 - DNA, 23 bp, synthetic construct
  misc_feature 1..23: note = Description of Artificial Sequence: Synthetic primer
  source 1..23: mol_type = other DNA
tggtggaaggaattagacagtgc

SEQ ID NO: 1254 - DNA, 21 bp, synthetic construct
  misc_feature 1..21: note = Description of Artificial Sequence: Synthetic primer
  source 1..21: mol_type = other DNA
atcagcgattgaggaaagtgc

SEQ ID NO: 1255 - DNA, 24 bp, synthetic construct
  misc_feature 1..24: note = Description of Artificial Sequence: Synthetic primer
  source 1..24: mol_type = other DNA
ttatgaaccccaatactcttttgc

SEQ ID NO: 1256 - DNA, 26 bp, synthetic construct
  misc_feature 1..26: note = Description of Artificial Sequence: Synthetic primer
  source 1..26: mol_type = other DNA
aggagcttatgttcttcaaatatacc

SEQ ID NO: 1257 - DNA, 26 bp, synthetic construct
  misc_feature 1..26: note = Description of Artificial Sequence: Synthetic primer
  source 1..26: mol_type = other DNA
ggataaactccatccagaatacttgc

SEQ ID NO: 1258 - DNA, 27 bp, synthetic construct
  misc_feature 1..27: note = Description of Artificial Sequence: Synthetic primer
  source 1..27: mol_type = other DNA
tcttgttcaaattcctcaaaagattgc

SEQ ID NO: 1259 - DNA, 23 bp, synthetic construct
  misc_feature 1..23: note = Description of Artificial Sequence: Synthetic primer
  source 1..23: mol_type = other DNA
gaagctcgatggttgaatgaagg

SEQ ID NO: 1260 - DNA, 21 bp, synthetic construct
  misc_feature 1..21: note = Description of Artificial Sequence: Synthetic primer
  source 1..21: mol_type = other DNA
cgcttgccctaacaatcttgg

SEQ ID NO: 1261 - DNA, 22 bp, synthetic construct
  misc_feature 1..22: note = Description of Artificial Sequence: Synthetic primer
  source 1..22: mol_type = other DNA
tgatggcttgctctttagttgg

SEQ ID NO: 1262 - DNA, 20 bp, synthetic construct
  misc_feature 1..20: note = Description of Artificial Sequence: Synthetic primer
  source 1..20: mol_type = other DNA
agccacgtcatccatgtacc

SEQ ID NO: 1263 - DNA, 28 bp, synthetic construct
  misc_feature 1..28: note = Description of Artificial Sequence: Synthetic primer
  source 1..28: mol_type = other DNA
agaatgagcaagagagaaatcatatacc

SEQ ID NO: 1264 - DNA, 20 bp, synthetic construct
  misc_feature 1..20: note = Description of Artificial Sequence: Synthetic primer
  source 1..20: mol_type = other DNA
ccatgcaataaccactcgcc

SEQ ID NO: 1265 - DNA, 22 bp, synthetic construct
  misc_feature 1..22: note = Description of Artificial Sequence: Synthetic primer
  source 1..22: mol_type = other DNA
taggcgagtggttattgcatgg

SEQ ID NO: 1266 - DNA, 21 bp, synthetic construct
  misc_feature 1..21: note = Description of Artificial Sequence: Synthetic primer
  source 1..21: mol_type = other DNA
cctagcaagattcagagcacg

SEQ ID NO: 1267 - DNA, 30 bp, synthetic construct
  misc_feature 1..30: note = Description of Artificial Sequence: Synthetic primer
  source 1..30: mol_type = other DNA
aaaatgagaaaatacataaaattgttcgac

SEQ ID NO: 1268 - DNA, 22 bp, synthetic construct
  misc_feature 1..22: note = Description of Artificial Sequence: Synthetic primer
  source 1..22: mol_type = other DNA
tcgatctccccaaatagatgga

SEQ ID NO: 1269 - DNA, 30 bp, synthetic construct
  misc_feature 1..30: note = Description of Artificial Sequence: Synthetic primer
  source 1..30: mol_type = other DNA
ttgaagaattgaaagaagtagtaagaaagg

SEQ ID NO: 1270 - DNA, 26 bp, synthetic construct
  misc_feature 1..26: note = Description of Artificial Sequence: Synthetic primer
  source 1..26: mol_type = other DNA
tcaaaatgataggacaatcccaaacg

SEQ ID NO: 1271 - DNA, 25 bp, synthetic construct
  misc_feature 1..25: note = Description of Artificial Sequence: Synthetic primer
  source 1..25: mol_type = other DNA
tgacaagttcaaagatgagaatggc

SEQ ID NO: 1272 - DNA, 20 bp, synthetic construct
  misc_feature 1..20: note = Description of Artificial Sequence: Synthetic primer
  source 1..20: mol_type = other DNA
tagtaaatcttccccgacgc

SEQ ID NO: 1273 - DNA, 20 bp, synthetic construct
  misc_feature 1..20: note = Description of Artificial Sequence: Synthetic primer
  source 1..20: mol_type = other DNA
acatttgagttgcgtcgggg

SEQ ID NO: 1274 - DNA, 21 bp, synthetic construct
  misc_feature 1..21: note = Description of Artificial Sequence: Synthetic primer
  source 1..21: mol_type = other DNA
tagcttggagcctgtttaggg

SEQ ID NO: 1275 - DNA, 23 bp, synthetic construct
  misc_feature 1..23: note = Description of Artificial Sequence: Synthetic primer
  source 1..23: mol_type = other DNA
aagaaaaaccctaaacaggctcc

SEQ ID NO: 1276 - DNA, 22 bp, synthetic construct
  misc_feature 1..22: note = Description of Artificial Sequence: Synthetic primer
  source 1..22: mol_type = other DNA
ctaagctcctttttgtgcatgg

SEQ ID NO: 1277 - DNA, 25 bp, synthetic construct
  misc_feature 1..25: note = Description of Artificial Sequence: Synthetic primer
  source 1..25: mol_type = other DNA
agagacaggagtgtggaactatacc

SEQ ID NO: 1278 - DNA, 24 bp, synthetic construct
  misc_feature 1..24: note = Description of Artificial Sequence: Synthetic primer
  source 1..24: mol_type = other DNA
tgtcatcagctattgtggcaaagg

SEQ ID NO: 1279 - DNA, 23 bp, synthetic construct
  misc_feature 1..23: note = Description of Artificial Sequence: Synthetic primer
  source 1..23: mol_type = other DNA
tgaagaatttgagcaagggctta

SEQ ID NO: 1280 - DNA, 24 bp, synthetic construct
  misc_feature 1..24: note = Description of Artificial Sequence: Synthetic primer
  source 1..24: mol_type = other DNA
gcgtaatgaactctgtaagtttct

SEQ ID NO: 1281 - DNA, 22 bp, synthetic construct
  misc_feature 1..22: note = Description of Artificial Sequence: Synthetic primer
  source 1..22: mol_type = other DNA
gtggttaaagaaagctgaacgc

SEQ ID NO: 1282 - DNA, 22 bp, synthetic construct
  misc_feature 1..22: note = Description of Artificial Sequence: Synthetic primer
  source 1..22: mol_type = other DNA
gccgacaaatagtagtggatgc

SEQ ID NO: 1283 - DNA, 22 bp, synthetic construct
  misc_feature 1..22: note = Description of Artificial Sequence: Synthetic primer
  source 1..22: mol_type = other DNA
tgaataggcgagtggttattgc

SEQ ID NO: 1284 - DNA, 18 bp, synthetic construct
  misc_feature 1..18: note = Description of Artificial Sequence: Synthetic primer
  source 1..18: mol_type = other DNA
tgcaagattcagggcacg

SEQ ID NO: 1285 - DNA, 18 bp, synthetic construct
  misc_feature 1..18: note = Description of Artificial Sequence: Synthetic primer
  source 1..18: mol_type = other DNA
tcagttgggggaccaatt

SEQ ID NO: 1286 - DNA, 19 bp, synthetic construct
  misc_feature 1..19: note = Description of Artificial Sequence: Synthetic primer
  source 1..19: mol_type = other DNA
catccgacgatgttcctag

SEQ ID NO: 1287 - DNA, 47 bp, synthetic construct
  misc_feature 1..47: note = Description of Artificial Sequence: Synthetic primer
  source 1..47: mol_type = other DNA
ggatcatcataaccttcttccaagatcttttgcatgcttattttgct

SEQ ID NO: 1288 - DNA, 47 bp, synthetic construct
  misc_feature 1..47: note = Description of Artificial Sequence: Synthetic primer
  source 1..47: mol_type = other DNA
tgaaggatccctggaaatatcaaattcttcaagtcgtaaaagtatgg

SEQ ID NO: 1289 - DNA, 22 bp, synthetic construct
  misc_feature 1..22: note = Description of Artificial Sequence: Synthetic primer
  source 1..22: mol_type = other DNA
tcttttgcatgcttattttgct

SEQ ID NO: 1290 - DNA, 25 bp, synthetic construct
  misc_feature 1..25: note = Description of Artificial Sequence: Synthetic primer
  source 1..25: mol_type = other DNA
ggatcatcataaccttcttccaaga

SEQ ID NO: 1291 - DNA, 22 bp, synthetic construct
  misc_feature 1..22: note = Description of Artificial Sequence: Synthetic primer
  source 1..22: mol_type = other DNA
tcttcaagtcgtaaaagtatgg

SEQ ID NO: 1292 - DNA, 25 bp, synthetic construct
  misc_feature 1..25: note = Description of Artificial Sequence: Synthetic primer
  source 1..25: mol_type = other DNA
tgaaggatccctggaaatatcaaat

SEQ ID NO: 1293 - DNA, 25 bp, synthetic construct
  misc_feature 1..25: note = Description of Artificial Sequence: Synthetic primer
  source 1..25: mol_type = other DNA
ggaagctttttctaagggatttgtg

SEQ ID NO: 1294 - DNA, 25 bp, synthetic construct
  misc_feature 1..25: note = Description of Artificial Sequence: Synthetic primer
  source 1..25: mol_type = other DNA
ccttccataaatattcatgaaggat

SEQ ID NO: 1295 - DNA, 18 bp, synthetic construct
  misc_feature 1..18: note = Description of Artificial Sequence: Synthetic primer
  source 1..18: mol_type = other DNA
aaatttgatgtgctcgcg

SEQ ID NO: 1296 - DNA, 47 bp, synthetic construct
  misc_feature 1..47: note = Description of Artificial Sequence: Synthetic primer
  source 1..47: mol_type = other DNA
tcaagtcgtaaaagtatggatccaacctggaaatatcaaatgatggt

SEQ ID NO: 1297 - DNA, 43 bp, synthetic construct
  misc_feature 1..43: note = Description of Artificial Sequence: Synthetic primer
  source 1..43: mol_type = other DNA
ctaggaacatcgtcggatgagacagaaacacctgtatcattca

SEQ ID NO: 1298 - DNA, 22 bp, synthetic construct
  misc_feature 1..22: note = Description of Artificial Sequence: Synthetic primer
  source 1..22: mol_type = other DNA
cctggaaatatcaaatgatggt

SEQ ID NO: 1299 - DNA, 25 bp, synthetic construct
  misc_feature 1..25: note = Description of Artificial Sequence: Synthetic primer
  source 1..25: mol_type = other DNA
tcaagtcgtaaaagtatggatccaa

SEQ ID NO: 1300 - DNA, 21 bp, synthetic construct
  misc_feature 1..21: note = Description of Artificial Sequence: Synthetic primer
  source 1..21: mol_type = other DNA
cagaaacacctgtatcattca

SEQ ID NO: 1301 - DNA, 22 bp, synthetic construct
  misc_feature 1..22: note = Description of Artificial Sequence: Synthetic primer
  source 1..22: mol_type = other DNA
ctaggaacatcgtcggatgaga

SEQ ID NO: 1302 - DNA, 25 bp, synthetic construct
  misc_feature 1..25: note = Description of Artificial Sequence: Synthetic primer
  source 1..25: mol_type = other DNA
agaggagatgttccgaaatcaattc

SEQ ID NO: 1303 - DNA, 22 bp, synthetic construct
  misc_feature 1..22: note = Description of Artificial Sequence: Synthetic primer
  source 1..22: mol_type = other DNA
tcttggaagaaggttatgatga

SEQ ID NO: 1304 - DNA, 18 bp, synthetic construct
  misc_feature 1..18: note = Description of Artificial Sequence: Synthetic primer
  source 1..18: mol_type = other DNA
aaatttgatgtgctcgcg

SEQ ID NO: 1305 - DNA, 48 bp, synthetic construct
  misc_feature 1..48: note = Description of Artificial Sequence: Synthetic primer
  source 1..48: mol_type = other DNA
tcaagtcgtaaaagtatggatccaataaatattcatgaaggatccctg

SEQ ID NO: 1306 - DNA, 43 bp, synthetic construct; identical to SEQ ID NO: 1297
  misc_feature 1..43: note = Description of Artificial Sequence: Synthetic primer
  source 1..43: mol_type = other DNA

SEQ ID NO: 1307 - DNA, 23 bp, synthetic construct
  misc_feature 1..23: note = Description of Artificial Sequence: Synthetic primer
  source 1..23: mol_type = other DNA
taaatattcatgaaggatccctg

SEQ ID NO: 1308 - DNA, 25 bp, synthetic construct
  misc_feature 1..25: note = Description of Artificial Sequence: Synthetic primer
  source 1..25: mol_type = other DNA
tcaagtcgtaaaagtatggatccaa

SEQ ID NO: 1309 - DNA, 21 bp, synthetic construct
  misc_feature 1..21: note = Description of Artificial Sequence: Synthetic primer
  source 1..21: mol_type = other DNA
cagaaacacctgtatcattca

SEQ ID NO: 1310 - DNA, 22 bp, synthetic construct
  misc_feature 1..22: note = Description of Artificial Sequence: Synthetic primer
  source 1..22: mol_type = other DNA
ctaggaacatcgtcggatgaga

SEQ ID NO: 1311 - DNA, 25 bp, synthetic construct
  misc_feature 1..25: note = Description of Artificial Sequence: Synthetic primer
  source 1..25: mol_type = other DNA
agaggagatgttccgaaatcaattc

SEQ ID NO: 1312 - DNA, 21 bp, synthetic construct
  misc_feature 1..21: note = Description of Artificial Sequence: Synthetic primer
  source 1..21: mol_type = other DNA
gggaccaattattcttttgca

SEQ ID NO: 1313 - DNA, 19 bp, synthetic construct
  misc_feature 1..19: note = Description of Artificial Sequence: Synthetic primer
  source 1..19: mol_type = other DNA
catccgacgatgttcctag

SEQ ID NO: 1314 - DNA, 48 bp, synthetic construct
  misc_feature 1..48: note = Description of Artificial Sequence: Synthetic primer
  source 1..48: mol_type = other DNA
ggatcatcataaccttcttccaagagcttattttgctttcacaaatcc

SEQ ID NO: 1315 - DNA, 47 bp, synthetic construct
  misc_feature 1..47: note = Description of Artificial Sequence: Synthetic primer
  source 1..47: mol_type = other DNA
atgaaggatccctggaaatatcaaatcttcaagtcgtaaaagtatgg

SEQ ID NO: 1316 - DNA, 23 bp, synthetic construct
  misc_feature 1..23: note = Description of Artificial Sequence: Synthetic primer
  source 1..23: mol_type = other DNA
gcttattttgctttcacaaatcc

SEQ ID NO: 1317 - DNA, 25 bp, synthetic construct
  misc_feature 1..25: note = Description of Artificial Sequence: Synthetic primer
  source 1..25: mol_type = other DNA
ggatcatcataaccttcttccaaga

SEQ ID NO: 1318 - DNA, 22 bp, synthetic construct
  misc_feature 1..22: note = Description of Artificial Sequence: Synthetic primer
  source 1..22: mol_type = other DNA
tcttcaagtcgtaaaagtatgg

SEQ ID NO: 1319 - DNA, 25 bp, synthetic construct
  misc_feature 1..25: note = Description of Artificial Sequence: Synthetic primer
  source 1..25: mol_type = other DNA
atgaaggatccctggaaatatcaaa

SEQ ID NO: 1320 - DNA, 21 bp, synthetic construct
  misc_feature 1..21: note = Description of Artificial Sequence: Synthetic primer
  source 1..21: mol_type = other DNA
acaaatcccttagaaaaagct

SEQ ID NO: 1321 - DNA, 22 bp, synthetic construct
  misc_feature 1..22: note = Description of Artificial Sequence: Synthetic primer
  source 1..22: mol_type = other DNA
catctcctcttttcatctcatc

SEQ ID NO: 1322 - DNA, 49 bp, synthetic construct
  misc_feature 1..49: note = Description of Artificial Sequence: Synthetic primer
  source 1..49: mol_type = other DNA
ttccagggatccttcatgaatatttccataaaattcttggaagaaggtt

SEQ ID NO: 1323 - DNA, 44 bp, synthetic construct
  misc_feature 1..44: note = Description of Artificial Sequence: Synthetic primer
  source 1..44: mol_type = other DNA
accctaccatatttcatcttggatccgacgatgttcctaggtca

SEQ ID NO: 1324 - DNA, 24 bp, synthetic construct
  misc_feature 1..24: note = Description of Artificial Sequence: Synthetic primer
  source 1..24: mol_type = other DNA
ccataaaattcttggaagaaggtt

SEQ ID NO: 1325 - DNA, 25 bp, synthetic construct
  misc_feature 1..25: note = Description of Artificial Sequence: Synthetic primer
  source 1..25: mol_type = other DNA
ttccagggatccttcatgaatattt

SEQ ID NO: 1326 - DNA, 19 bp, synthetic construct
  misc_feature 1..19: note = Description of Artificial Sequence: Synthetic primer
  source 1..19: mol_type = other DNA
cgacgatgttcctaggtca

SEQ ID NO: 1327 - DNA, 25 bp, synthetic construct
  misc_feature 1..25: note = Description of Artificial Sequence: Synthetic primer
  source 1..25: mol_type = other DNA
accctaccatatttcatcttggatc

SEQ ID NO: 1328 - DNA, 19 bp, synthetic construct
  misc_feature 1..19: note = Description of Artificial Sequence: Synthetic primer
  source 1..19: mol_type = other DNA
atgcagtgcatggcttttc

SEQ ID NO: 1329 - DNA, 30 bp, synthetic construct
  misc_feature 1..30: note = Description of Artificial Sequence: Synthetic primer
  source 1..30: mol_type = other DNA
ttacatgggaatagggttaataatcaaatc

SEQ ID NO: 1330 - DNA, 20 bp, synthetic construct
  misc_feature 1..20: note = Description of Artificial Sequence: Synthetic primer
  source 1..20: mol_type = other DNA
atgtcatatcaagttttagc

SEQ ID NO: 1331 - DNA, 23 bp, synthetic construct
  misc_feature 1..23: note = Description of Artificial Sequence: Synthetic primer
  source 1..23: mol_type = other DNA
tgggatttgatctataagtaacg

SEQ ID NO: 1332 - DNA, 23 bp, synthetic construct
  misc_feature 1..23: note = Description of Artificial Sequence: Synthetic primer
  source 1..23: mol_type = other DNA
cgggatttgatctataagtaacg

SEQ ID NO: 1333 - DNA, 20 bp, synthetic construct
  misc_feature 1..20: note = Description of Artificial Sequence: Synthetic primer
  source 1..20: mol_type = other DNA
atgtctagtcaagtgttagc

SEQ ID NO: 1334 - DNA, 22 bp, synthetic construct
  misc_feature 1..22: note = Description of Artificial Sequence: Synthetic primer
  source 1..22: mol_type = other DNA
taatgggatgggatctataagc

SEQ ID NO: 1335 - DNA, 23 bp, synthetic construct
  misc_feature 1..23: note = Description of Artificial Sequence: Synthetic primer
  source 1..23: mol_type = other DNA
atgtcaaatattcaagtcttagc

SEQ ID NO: 1336 - DNA, 22 bp, synthetic construct
  misc_feature 1..22: note = Description of Artificial Sequence: Synthetic primer
  source 1..22: mol_type = other DNA
taatgggatgggatctataagc

SEQ ID NO: 1337 - DNA, 23 bp, synthetic construct
  misc_feature 1..23: note = Description of Artificial Sequence: Synthetic primer
  source 1..23: mol_type = other DNA
actgtggtcgataaccctagttc

SEQ ID NO: 1338 - DNA, 27 bp, synthetic construct
  misc_feature 1..27: note = Description of Artificial Sequence: Synthetic primer
  source 1..27: mol_type = other DNA
catgggaatagggttaataatcaaatc

SEQ ID NO: 1339 - DNA, 1677 bp, synthetic construct
  misc_feature 1..1677: note = Description of Artificial Sequence: Synthetic polynucleotide
  source 1..1677: mol_type = other DNA
atgttcacacaaatcttagtatcttcaaatgacaacccaaatataattgttcgtcctacaaaaaaattccacccaaatatttggggagaacgattcttacattacaacatttcacaacaagatttgtattgtcaacaacaaaaggttgaggaattaaaagaagtggttagaagagaaatatttggagattattattatgatgcttggaaaaatcaattgaagataattgatgtggtagaacgtttgggattgtcttatcattttgaaactgaaatagaaaataagcttcaatgcatttacaacaaaactaatattattgatgatgaagatttacaccatgtttctattcgatttagacttctacgacaacatggatttagaatttcttctgatatatttgaaaaattcaaagacgaggatgggaactttaaaaaatgcttggtaagtgatacctttggtttgcttagcttatatgaagcctcacatttgagttgtgttggagaaaatatacttgatgaagcacttgctttcacaacaacacacctaaatgagtttttggtgaagaaaaaagaacaccatgaagacgatgatccattatcgaaagaaatatctcgagccctagagaggcccttaagaaagaccctagtaaatcttcatgcaaggcatttcatttcgatatatgaaaaagatgcctcacataacaaagtattgttacaacttgcaaaattagatttcaatctattacaatgcatgcataaaaaggaacttagtgaagtcagcaggtggtggaaagaatcagattttgtacacaaatttccatttgcaagagataggattgtggaattatacctttggatattaggagtttattatgaaccccaatattgtttggcaagaaatattttagtcaaaatcatagctttggcctcaattgcggatgatatttatgatgcatatggtacacttgaagaacttgagctcctaactcatgcaattgaaaggtgggatataaattgtgtggatacactgaatcaagaatatatgcaaacattttataaggatgttttgaattgttatgaagagtttgagcaagtgctagaaaaagaagaacaatacaaagttcattatgcaaaagcagcgtttaagggattagtccgatctcatttggatgaagctcgatgtttgcatagaggactcatcccaagttttgaagagtacttgaaatttgctttggataattgtggttactacatgttgatactaagctctttggttggaatgaaaactaatattgtaacaaaagatgtttttgagtggctctccaaagatcgaaagattattagagcatctgttactatttgtaggctcatggatgacatagctgaacacaagtttgaggaagatgattatgaggaacattcagcagtggaatgctatatgattgaacatggcgtttgtgaagaggaagcctatgatgaactgaataagctaataatgaatgcatggaaagaaataaatgaagagtttttgaagcctactaaagtagcttcacccatattacttcgtgctcttaacttttcaagggttatggatcttattttcaaatttggagatggttatacacacgttggaaaagtcaccaaagatattgttgctgctttgcttattcatccaatt

SEQ ID NO: 1340 - DNA, 1713 bp, synthetic construct
  misc_feature 1..1713: note = Description of Artificial Sequence: Synthetic polynucleotide
  source 1..1713: mol_type = other DNA
tcaagtacttgctaccccatcaaatgttctgtggtccataaccctagttctactactattgttagaagatcaggaaactatgaacctcccatttggtcttttgattatattcattctctttcaagcaaatataagggagaagcttatacaaatcgactgaaaaagcttgagaaagatgtgaaaatgatgctacttggcatggaaattaattctttagcccaacttgagttcattgatacattacaaaggcttggaatatcttatcattttaaaaatgaaataaatactattttaaagaaaaaatacactaataatacaaatattatgaataaaaaccctaactatgacttatatgccacttctttggaatttaggcttctacgggagtatggatttgtagtacctcaagaaattttcaatgattttaaggatgatgaaacaggagagttcaaggcaactataaatgatgatattatgggagcattggctttatatgaagcttcattttatgggaaaaatggtgaaagtgttttggaagaagcaagaattttcacaaccaaatgtcttgaaaaatacaaaatattgtcaagtgataataataataataataataatatattattattagtggatcatgctttggaaatgccacttcattggagaatcacaaaatcagaagctagatggttcattgaagaaatatatgagaaaaaacaagacatgatgatgaattctactttgcttgagtttgccaaattggatttcaacattgtgcaatcaacatatcaagaagagctcaaatatctctctaggtggtggaagcattctaaacttggagagaaattgcctttcgttagagatagattgatggagtgtttcatgtggcaagttggaataagatttgagccagaattcagttactttagaataattgctacacaaatctatgttctaatcacaataattgatgatatgcatgacatatatgcaactttggaggaactacaactcttcgctaatgctcttcaaaggtgggatttgaaagtaatagatgagttaccggattacatgaagatggctttcttcattttatacaatttcacaaatgaaatggtgtttaatgtattaggagaacatggttttgttaaccttgaatacttcaagaaattgtggatagacatatgtaaacatcaattgcaagaggcaaaatggttctatagtggataccaaccaacattgcaagaatatactgaaaatgcttggatttcagtaggaggaccagcttttcttatgcatgcttatttctgttttacaaatctcataacaaatgaagaagtggaatgtcttaaagagggttatcccaatattgttcgacatggatccctaatattacgacttgcagatgatctaggaacatgttcggatgaaatgaaaagaggcgatgttcctacatcaattcaatgttacatgcatgatactggtgtttctgaagacgaagctcgtgagcacatcaagcatttgataagcgaatcatggaaggagatgaataatgaaaatggagatcataattcttctttctcgaaagaatttgttcatgtttgcaaaaatcttggtagagcgtcacaatttatataccaatatggagatggacatgcttctcaaaatactctatcaaaagatcgtatttttaaaattattattaatcctttcccc

SEQ ID NO: 1341 - DNA, 1572 bp, synthetic construct
  misc_feature 1..1572: note = Description of Artificial Sequence: Synthetic polynucleotide
  source 1..1572: mol_type = other DNA
caacaacaaaaggttgaggaattaaaagaggtgattagaagagaaatatttggggaatcatcaatatcatcatcagcttattatgatgcttggaaaaatcaattgaagataattgatgtggtagaacgtttgggattgtcttatcattttgaaactgaaatagaaaatatgatagaacaaatctacaacaaaaccaataattttgatcttcttaaggatgaagagttgcatgatgtttccttgtgggttagacttctacgacaacatggatttagggtttcttctgatatatttaaaaaattcaaagatgaggatggaaactttaaaaaatgtttggtaagtgatactcttggtttgcttagcttatatgaagcctcacatttgagttgtgttggagaaaatatacttgatgaagcacttgctttcacaacaacacacctaaatgagtttttggcgaagaaaaaagaacaccatgatgacgatgatccattatcgaaagaaatatatcgtgccctagagaggcccttaagaaagaccctagtgaatcttcatactaagcatttcatttcgatatatgaaaaagatgcctcacataacaaagtattgctacaacttgcaaagttagattttaatctattacaatccctacacaaaaaggagcttagtgaaatcagcaggtggtggaaagaatcaaactttgtacaaaaattcccttttgcaagagatagaattgtggagctctatctgtggatgttaggagtctattatgaaccccaatactctttggcaagaaatattttagccaaaatcatagctttttcctcaattgctgatgatatttatgatgcatatggtacatttgaagagcttgaactcctaactcaagcaattgaaaggtgggatataaattgtattgatacactcaatcaagaatatttgaaaacattttataaggatcttttgaattgttatgaagagtttgagcaagtgcttacaaaagaagaaacttatagagttcattatgcaaaagaagtgtttaaagagttaatccgatcatattttgatgaagctcgatggttgaatagtggacgtgtcccaaattttgaagagtacatggaatttgcaaccattaattgtggttactatatgttgatagtgagttctttggttggaataaaaactagtattgtaaccaaagatgtttttgagtggctctccaaagatcgaaagattattagagcatctgttattatttgtaggctcatggatgacatagctgaacacaagtttgagaaagacaaatatgatgaagattctgccattgaatcgtatatgatgcaacatggtgtttgtgaagaagaagcctatgatgaactcaataagcttataattaattcatggaaagaaataaatgaagagtttttgaagccaactaaattagcttcacccatattacttagggttcttaatttttctagggttatggatcttctctacaaaaatggtgatggttttacacatgttggaaaagtcaccaaagatactgttgctgctttgctaattgatcccatt

SEQ ID NO: 1342 - DNA, 1584 bp, synthetic construct
  misc_feature 1..1584: note = Description of Artificial Sequence: Synthetic polynucleotide
  source 1..1584: mol_type = other DNA
aataacaaagagagttatgtgaagattattgagctgaaggaacaagtgaagaataaattacttcatggtcttcatcctttggaaaaccctttagagacacttgaatatattgatgatattcaacgattggggttatcttattatttcgaaaatgaaattgaacaagttttgaagcaatttcataataataacaatcttcatcacgattttggtgataacctttatgctgatgctcttcgctttcggttgcttagggaacaaggttataatagtgcatgtgaggtattcgccaaatataagaatgagagaggaaaatttaaggaatcaattttgagtgacattcgaggaatgttgaacttgtatgaagcttcacaaatgagagtttgcagagaaaaaatactagatgaagcacttatcttcacaactactcatcttcagtccttagtggaaacatcccaattgagctctccttatttagacctagtgaaacatgccctaatgcaccctattcgaaagagcttacaaagaagagaggcaagactttacatatcacgttaccaccaactaccttctcacgaaaagcttcttttaactcttgccaaactagatttcaacttgcttcaacaactacatcaaaaagaattaaattatattacgaggtggtggaaggagtttgacttcaaaagtaagcaatctttttcaagagacagaatagtggagtgttacatttggaattatggagtatattttgaagctcaaacttcccaaattaggttgatgatgaccaagttgatttctttgcttactattattgatgattcttatgatagctatggtacacttgaagagctaaggccttttactgaagcagttagaaaggtatttaattatatatacaaacatatgaagtgggatatatctgctactgaaaatttactagagtacatgaaagtatgttacaagaaatttttagaatttttcaatgaaattgaagaatttacaaaggaaaatccatactgtgcgagctatgttaagaaagggttgcaatgtatggttagagcttatagtaaggaagcccaatggttacacaataaatatatgccaacatttgatgaatattatccaattggacttgataatgctggatctgatgagctaatatcaatggccttttgtggaatgggaaatgttgtaacaaaagaatctatggattggatattttctcaaccccaacctaagattatacgaactatgtcaattgttggaagacttatgaatgacattggctaccacaagtcggatcgaagaaaattatcaaaagatgtagtggcttccgctgtggagtgttacatcaaacaatatggtgtaacagatgaagaagctatagagaaacttaacgaacaagttaatgattcatggaaggatctcaatgaagatcttctttatccaatcgctattcctagaccactcttaatgagagttctcaatcttgtacgagtgaaccatgagatgtatagagaaggcgacggttttacacaaccaacattgctcaagaatttgattgatactctcatcatcaatccc

SEQ ID NO: 1343 - DNA, 1689 bp, synthetic construct
  misc_feature 1..1689: note = Description of Artificial Sequence: Synthetic polynucleotide
  source 1..1689: mol_type = other DNA
agtactacaatattcaaagaacaaccggaagcaattgtccgacgatcaggaaactacaaacccacgttgtgggatgctcattttttcaaatcactccaagtcatatatacggaggaaagctatgggaaaagaatcaatgagctgaaagaagatgtgagaagaattcttgagaaggaggctgagaatcctttagttaaacttgaacagatcaatgatttgagcagacttggaatatcttatcactttgaagatcaaattaagacaatattaaacctgacatttaacaataataatgcattgtggaagaaagataatctgtatgccactgctcttcatttcaaactccttagacaatatggattcaatcctgtatcttcagaggttttcaatgccttcaaagaccagaaaaaagagttcaaagaaagtttgagtaaggatgtgaaaggaatggtatgtctatatgaggcttcattctattcatttaggggtgaacccatattagatggagcaagagacttcacaaccaaacatctgaaacaatacttgatgacgaggcaatgtcaaactaaatctgttgaccatgatgatgatgatgatcttgtgaaacttgtggagcatgccttggatcttccactccattggagattgccaagattggaggctaggtggttcattgatatgtatgctgaaaggaattatgatatgaatccaacttttcttgacttcgctaaacttgactataacttcgttcagtcagcataccaaaaagagctcaaatatatttcaaggtggtggagtggttctaggttgacagaaaggctaccatttgctagagacagagtagtggaaattttctattctgcagtggcattaaaatatgaggcagaatttggatttgttagaactgtgatgacaaaaattggtctcttgctaacactcatggacgatatatatgatgtgtatggtacactagatgagcttcagctttttctaggggcaattgagaggtggaatataaatgaattggatcagctacccgattacatgaagatattgtttgttgctttttataacaatgtgaatgagatatcttattatgtccttaaagaaaatgggattcacatcatcaaatatctgaagaaagcgttgggggatctgtgtaaatgctatatggaggaggcaaaatggtttcacagtggacacataccaagtttagaagaattcattgagaatggatggaaatcaattacaatacctctttgtcttatctatcattattgcttaattacaacttcaattacagaacaagacatggaacacttgcttcaatatccaactattttacgtgtctcaggaactgtctttcgatttatagatgatttgggaacctcatcagatgaacttgaaagaggagataatccttcatcaattcaatgctacatgcgtgaaaagggtgttagtgaaaatgaaagccgtgaacacatatggaatttaataagtgaaggatggaaggaaattaatgaagtcaaagcttcaaactctccatactctcaagtgtttattgaatctgccattgattttgttagaggagcaatggagatgtatcacaagggtgatggctttggtactaatcaagaccgatatcttaagaccaaagttgtcaacatgttcttcgatccaattccaatt

SEQ ID NO: 1344 - DNA, 1683 bp, synthetic construct
  misc_feature 1..1683: note = Description of Artificial Sequence: Synthetic polynucleotide
  source 1..1683: mol_type = other DNA
caatgtagtttggccaaaagccctagtagtgatactagtacaattgttagaagatcagccaactatgatcctcccatttggtcttttgatttcattcagtctcttccatgcaaatataagggagaaccctatacaagtcgatcgaataagctaaaagaagaagtgaaaaagatgttagttggaatggaaaactctttagtccaacttgagttgattgatacattacaaagacttggaatatcttatcattttgagaatgaaatcatttctattttgaaggaatatttcactaatattagtactaataaaaaccctaaatatgatttatatgccactgctttcgaatttaggcttttacgcgaatatggatatgcagtgcctcaagaaatttttaatgattttaaggacgagacgggaaagttcaaagcgagtattaaaaatgatgatattaagggagtattggctttatatgaagcttcattctatgtgaaaaatggcgaaaatattttggaggaagctagggttttcacaacagaatatctcaaaagatatgtaatgatgattgatcaaaacataatattaaatgataatatggcaatattagtgagacatgccttggagatgccacttcattggaggactataagagcagaagctaagtggttcattgaagaatatgagaaaacacaagacaagaatggcactttgcttgaatttgcgaaattggatttcaacatgcttcaatcaatatttcaagaagatctaaaacatgtctcgaggtggtgggaacattctaagcttggaaagaataaaatggtttatgctagagatagattggtagaggcttttctatggcaggttggaataagatttgagccacaattcagccactttaggagaatatctgcaagaatatatgctctaattacaatcatagatgacatatatgatgtgtatggaacattggaagagttagagcttttcaccaaggctgttgagagatgggatgcgaagaccatacacgagttaccagattatatgaagttgcctttctttactttatttaacaccgtaaatgaaatggcgtatgatgtattagaagagcataattttgtcaccgttgaatacctcaagaactcgtgggcagagttatgtaggtgctatttggaagaggcaaaatggttttatagcggatacaaaccaaccttgaagaaatatattgagaacgcctcgctttcaataggaggacaagttatttttgtgtatgcttttttctctcttacaaagtccataacaaatgaggccttagagtccttgcaagagggtcattacgctgcatgtcgccaaggatccttgatgttacgacttgcagatgatcttggaacatcatcagatgaattgaaaagaggtgacattcctaaatcggttcaatgttacatgcacgagactggtgtttctgaagatgaagctcgtgaacacatcaaatttttgataagtgaaatatggaaggagatgaatgatgaagatgaatataactctattttctctaaagagtttgttcaagcttgcaaaaatcttggtaggatgtcattatttatgtatcaacatggagatggacatgcttctcaagatagccattcaaggaaacgtatttcagatttaattattaaccctattccttta

SEQ ID NO: 1345 - DNA, 1680 bp, synthetic construct
  misc_feature 1..1680: note = Description of Artificial Sequence: Synthetic polynucleotide
  source 1..1680: mol_type = other DNA
gatagttctgttactaatattgttcgaagatcagccaactttgaaccatccatttggtcttttgatttcattcagtctctttcaagcaaatataagggagaaccttatacaagtcgagtaaaaaaactcgaggaagatgtgaaaaggatgctagttgagatggaaaactctttagctcaacttgaactcattgacacgttacaaagacttggagtatcttatcgttttgagaatgaaataaatactattttaaaagaaaaatatgtcaatattaatggtaatattaataaccctaattataatttatatgccactgctcttgaatttaggcttctacgtcaacatggttatgctgtacctcaagagacttttaattattttaaggacgagacaggaaaattcaaaacaaacataagtggtgatatcatgggagtattggccttatatgaagcttcattctatgagaaaaaaggcgaaagcattttagaggaagctagaattttcacaactgaatgtctcaaaaactacacaataatgatatcagagcaaaagaaattgatgattaataataattatgattattattacgatattgaagtagtgaatcatgctttggagctcccacttcatcgaaggaccacaagaatagaagctaagtggttcatcgatacgtataagaaaaaacaagacatgaatcctattttgcttgagtttgccaaactcgatttcaacatgatacaatcaacacatcatgaagatttgaaacatatattcaggtggtggaggcatactaaacttggtgagaaattgaattttgcaagagatcgattgatggaatgttttttatggaaagttggaataagatttgagccaaaattcagttattttagaacaacaactgtcaaattacttgagctaataacattaattgatgatatatatgatgtttatggaacattagatgaattagagcttttcaccaaagctattgagagatgggatgtggaaatgataaatgaattaccagaatacatgaagatgccttatattgttttacacaatacaataaatgaaatggtatttgagatattaagagatcaacacatcaccatcaaaattcaatacttaaagaaaacgtgggtagatctgtgtagatgttttctacaagaagcaaaatggtattacagtggatacacaccaacattggaagaatatattgaaaatggttggatttcagtgggagcaccagttcttattgtgcatgcttattttcattcaaataataataaagagattttcgaatgcttggaacatggttattatcctaccataattcgtcacagtgccataataatacgacttacaaatgacctagcaacatcatctgaagaactgaaaagaggtgatgctccgacgtcaattcaatgttacatgcaagaaaaaaatatatgtgaagaggaagctcgtgaacatattaagtttttaataagtgaagcgtggaaggagatgaataacagtgaatctgatgatggattaatatatccaatctcattgattgaagatgcgagaaactttgctaggataggattatacatgtatcaacatggtgatggtcacagttctcaggataatctatccaaagaaagaatttcatcctttattattaaacctattccccta

SEQ ID NO: 1346 - DNA, 1590 bp, synthetic construct
  misc_feature 1..1590: note = Description of Artificial Sequence: Synthetic polynucleotide
  source 1..1590: mol_type = other DNA
aataacaaagagagttatgtgaagattattgagctgaaggaacaagtgaagaagaaattacttcatggtcttcaacctttggaaaatcctttagagacacttgaatatattgatgatattcaacgattggggttatcttattattttgaaaatgaaattgaacaagttttgaagcaatttcataataataataacaatcttcatcatgattttggtgataataacctttatgctgatgctcttcgctttcggttgcttagggaacaaggctattttatagcatgtgaggtatttgccaaatataagaatgagaaaggaaaatttaaggaatcaatttcgagtgacattcgaggaatgttgaacttgtatgaagcttcacaaatgagagttcgcagagaagaaatactagatgaagctcttatcttcacaactactcatcttcagtccttagtggaaacatctcaattgagctctccatatctagacctagtgaaacatgccctaatgcaccctatccgaaagagctttcaaagaagagaggcaagactttacatatcactttaccgtaaactaccttctcacgaagagcttcttttaaccctcgccaaactagatttcaacttgcttcaacaactacatcaaaaggaattgaattatattacgaggtggtggaaggagtttgacttcaaaagtaagcaatctttttcaagagacagaatagtggagtgttacatttggaattatggagtatattttgaagctcaaacttcccaaattaggttgatgatgaccaagttgatttctttgcttactattattgatgattcttatgatagctatggtacacttgaagagctaaggccttttactgaagcatatatatatttacttaattaatatgatatgatcatcaggtgggatatttttgctactgacaacttgccagagtacatgaaagtatgttacaagaaatgtttagaatttttcaatgaaattgaagaatttacaaaggaaaattcattctgcgcgagttatgttaagaaagggttgcaatgtatggttagagcttatagtaaggaagtccaatggttacacaataaatatatgccaacatttgatgaatattatccaattggacttgataatgctggatctgaagagctaatatcaatggccttttgtggaatgggagatgttgtaacaaaagaatctatggattggatattttctcagccccaacctaacattatacgaactatgtcaattgttggaagacttatgaatgacattggctaccacaagtcggatcgaagaaaattatcaaaagatgtagtggcttctgctgtggagtgttacatcaaacaatatggtgtaacatatgaagaagctatagagaaacttaacgaacaagttaatgattcatggaaggatctcaatgaagatcttctctatccaatcgctattcctagaccactcttaatgagagttctcaatcttgtacgagtgaaccatgagatgtacagagaaggtgacggttttacacaaccaacattgctcaagaatttgattgatactctcatcatcaatccc

SEQ ID NO: 1347 - DNA, 1896 bp, synthetic construct
  misc_feature 1..1896: note = Description of Artificial Sequence: Synthetic polynucleotide
  source 1..1896: mol_type = other DNA
atggctgcattagtgtccactgtaagtagtattattaggtggaatagtaataataataataccttcactagatctgtgaaatcatgtttaagttcaaattaccataataataataatattattcataataaaactgcattaatgtccaccaataataataataataataataataataataatcagaagagatcagcaaactatcaacccccactttggcattttgactatgttcaatcactttctactcctttcaaggaaggagcatatgccaaaagagttgagaaagtaaaagaagaggtaagagtaatggtgaagagagcaaaagaggaggagaagcctttatctcaacttgagctaattgatgtaatgcaaagacttggaatctcttaccactttgagaatgaaattaatgacatattgaaagatatatataacaacaataatgtgtgcaacaccaacaaaaatgtgtatgccaattctcttgaatttagactcctaagacaacatggttatccagtgtctcaagaaatttttagtacgtgcaaagatgaaagaggcaattttatggtgtcttccaatgatatcaaaggaatgttatctttatatgaagcttcattctatttggtagaaaatgaagatggtattttggaagagacaagacacaaaacaaagaaatatcttgaggaatacataatcatgatcatggaaaaacaacaatcattattagatcaaaataataataataatgataatgattatgattatgaactagtgagccatgcattggagcttccacttcattggagaatgttaagattggagagtaggtggtttattgatgtgtatgagaagagactagacatgaaccctactctacttaccttagctaaactagatttcaacattgtccaatcaacataccaagatgatcttaaatatgttttcaggtggtggaaaaacactggtttgggagaaaagttgaaatttgcaagagatagaatgatggtgaattttttatggacaataggagtttcatttgagccacactacaaaagtttaagaagaatggctacaaaagtaaatgctttaataacaataatagatgacatatatgatgtttatggtacacttgatgaattggagctcttcactaatgtggttgagagatgggatgttagtgctatgaatgggctccctgagtatatgaagtcatgtttccttgctttgcacaattttataaatgactttgcatttgatgtgttaaaaggaaaaagcctccatgtaaaaaaataccttcaaaaaacgtgggcagatctttgtaaatcttatttaagagaagcaagatggtattatgatggatacacaccaagatttgaagagtacattgagaatgcatggatatcaatatcaggacctgttatactatcacatttatacttttttgtagtaaatccaaacgaggaagatgccttattaagtacttgctttaatggataccctaccataatacgccattcgtcgatgattttacgacttacaaatgatctcgccacttcaacggatgagttgaaaagaggtgatgttcccaaatcaattcaatgcaaaatgcatgaagatcgtgtatgtgaagagaaagctcgtcaacatattaagttattaataaatgaaacatggaagtttcttaataaagattgcataaatttggatgatgattactctccaatgttctctaaatctaataataatattaataaggctttcattgaaatgtgtttaaaccttggtagaatgtcacattgcatttatcaatatggagatggacatggaattcaagatcgccaaacaaaagatcatgtactatcattacttattcaccctattcttcttacccaa

SEQ ID NO: 1348 - DNA, 1491 bp, synthetic construct
  misc_feature 1..1491: note = Description of Artificial Sequence: Synthetic polynucleotide
  source 1..1491: mol_type = other DNA
gaacgctccatagaagctttgaacttggtcaacgctgtgcttagagtcggcattgattatcatgtccaagatgagattaaatctatccttgaaagggaacatataattttcagtgaccatattagtaaccaatattttaataatattaatcaagaccacctgtatgaggtttctcttcgtttccgattactgagacaaggaggttatgatgtctctccagatgtgtttaacgagttgatgaaggacaaaaagggaaatttcaatgttttagtggaagaagacagagagggactaagagaattgtttgaagcctcacaagtaagaatagaaggagaagaggtactagaggaagctgaagtgttcagtggcgaacacctaaaagaatgggcaaatcttcatcgtcatacgagtgaagctcgaagtattcaattaacgttagaccaaccttgtcataaaagcttggccagggtcacatctccaaactttttggacagtttctcagccaacactgctaccagagaccaaggctggacctggatgacccttttaaacaaactggtcacaatggacttcaaaatagttcagtctattcaccaaagggaaattgttcaagtctccaaatggtggaaagagcttggtttggcagaggagttgaaatttgctagagaccaacccctaaaatggtacctctggacagtggcaagtctaccagatccaagcttgtctgaagagaggattgaactaactaaacccatttctctcgtctacataatagatgatatttttgatgtttatgggacactagacgaactcactcttttcacagacgcagttaataattgggaaattaaagagcagttacccgactatttgaagatatgtttcaaggcacttgatgatataaccaacaaaattagctacgtggtgtacagaaaacatggatggaacccaattgactccttaagaaaatcgtggggaaaactgtgcaatgcgttcttgttagaagcagagtggtttggttgtgggaagttgccaaatgaagaggagtatttgaagaacgcgattgtgagttctggtgtacacgtggtgctagttcatatgttctttctcttaggtgaaggtatatccatggaagctgtaaacttactggacaacattccaggccttgtgtcttctacagcagcaattcttcgtctttgggatgacttaggaagtgccaaggatgagaatcaaaatgggcatgatgggtcttacgttgagtgctacatgaaaagacacaaggagtgttcaatgggcgaagcaagggagcaagtgattcgtatgattaaaaatgagtgggaacgcctcaataaggagtgtttctcgccaaaacattttcccatgtgcttcagaaagggttgtcttaatgctgctaggatggttccagtgatgtatgactatgatgatcatcatcgccttccaagcctccagaattatatcaactcacttctc

SEQ ID NO: 1349 - DNA, 1677 bp, synthetic construct
  misc_feature 1..1677: note = Description of Artificial Sequence: Synthetic polynucleotide
  source 1..1677: mol_type = other DNA
gatagttctgttactaatattgttcgaagatcagccaactttgaaccatccatttggtcttttgatttcgttcagtctctttcaagcaaatataagggagaaccttatacaagtcgagtaaaaaaactcgacgaagatgtgaaaaggatgctagttgagatggaaaactctttagctcaacttgaactcattgacacgttacaaagacttggagtatcttatcgttttgagaatgaaataaatactattttaaaagaaaaatatgtcaatattaatggtaatattaataaccctaattataatttatatgccactgctcttgaatttaggcttctacgtcaacatggttatgctgtacctcaagagacttttaattattttaaggacgagacaggaaaattcaaaacaaacataagtggtgatatcattggagtattggccttatatgaagcttcattctatgaaaaaaaaggcgaaaacattttagaggaagctagaattttcacaactgaacgtctcaaaaactacataatgatatcagagcaaaagaaattgatgattaataataattatgattattattacgatattgaagtagtgaatcatgctttggagctcccacttcatcgaaggaccacaagaatagaagctaagtggttcatcgatatgtacaagaaaaaacaagacatgaatcctattttgcttgagtttgccaaactcgatttcaacatgatacaatcaacacatcatgaagatttgaaacatatattcaggtggtggaggcatactaaacttggtgagaaattgaattttgcaagagatcgattgatggaatgttttttatggaaagttggaataagatttgagccaaaattcagttattttagaacaactgtcaaattacttgagctaataacattaattgatgatatatatgatgtttatggaacattagatgaattagagcttttcaccaaagctattgagagatgggatgtggaaatgataaatgaattaccagaatacatgaaaatgccttatattgttttacacaatacaataaatgaaatggtatttgagatattaagagatcaacaaatcaccatcaaaattcaatacttaaagaaaacgtgggtagatatgtgtagatgttttctacaagaagcaaaatggtactacagtggatacacaccaacattggaagaatatattgaaaatggttggatttcagtgggagcaccagttcttattgtgcatgcttatttttctcattcaaataataataaagagattttcgaatgcttggaacatggttattatcctaccataattcgtcacagtgccataataatacgacttacaaatgacctagcaacatcatctgaggaactgaaaagaggtgatgctccgacgtcaattcaatgttacatgcaagaaaaaaatatatgtgaagaggaagctcgtgaacatattaagtttttaataagtgaagcgtggaaggagatgaataacagtgaatctgatgatggattaatatatccaatctcattgattgaagatgcgagaaactttgctaggataggattattcatgtatcaacatggtgatggtcacagttctcaggataatctatccaaagaaagaatttcatcctttattattaaacctattccccta

SEQ ID NO: 1350 - DNA, 1656 bp, synthetic construct
  misc_feature 1..1656: note = Description of Artificial Sequence: Synthetic polynucleotide
  source 1..1656: mol_type = other DNA
atgtcaaatattcaagtcttagcttcatctcaattaagtgacaaaattattgctcgtccaacaacaaattttcacccttctatttggggcgatcgattcctccattacaatatttcagaacaagatttggtttgcaaagaagaaagaattgaagaattaatacaagttgtaaagaaagagatattatcttcaaatcatgatcaattgaagttgattgacaatctccaacgtttgggattatcacatcattttgagagtgaaattgagaaattgttggaacaattaaatatcggcactcatcatcaaaatcatcaagatctacatgatgcttctctttggtttagattattaagacaacatggatttaatgtttcatcaagtatatttgaaaaatttaaagacgagaaaggtaactttaaagaaagcctaataactgatgttccaggtttgcttagcttgtatgaggcttcccacttgagttatgttggagaaagcatactagatgaagcacttgctttcacaactactcaccttaaggctattgtggcaaatagtaaagatcatccattatcacatcaaatatccatagccttgcataggcctctaagaaagaccatagagaggcttcatgctaggttttacatctcaatctatgaaaaggatgcctctcataacaaagtattgctagagcttgcaaagttagatttcaatctacttcaatgtttccacaaaaaggaacttagtgaaattatgaggtggtggaaagagcatgagtttgcaaagaaatttccttttgcaagagataggatggtggaacagtatttttggatattgggtgtatattatgaacccaaatactctcgagcaagaaaacttctaaccaaagtcattgcattagcctcaatcactgatgatatttatgatgcatatggtactattgatgagcttgagcttcttacaaaagcaatgcaaaggtgggacataacttgtatggataaacttgagccagaatatttaaagacatattataaggcaatgttggattcttatgaagaatttgaaaaggagcttaaaaaggaagaattatacaaacttgagtatgcaaaagaagagatgaaaagaattattggagcttattttgaagaagctcgatggttgagtgaaggatatttgccaaggttggatgagcatttgagagtttcatatgtttcttgtggttacgttttgttgatagccacaagttatgtaggaatgcatgatattgtaacacatgaaactctaaattggctctccaaagaccctaaaattgtttcagcttccactctccttgctaggttcatggatgatattggttctcgcaagtttgagcaaaagagaaatcacataccatctacagtggattgttacatgaaacaatatggggtatcagaggaagaggcaattaaagaacttaataaaagagtggacacccactggaaagaaattaatgaagactttattaggccaactgttgtgccttttcctatcttagttcgtgttcttaattttacaaaaacagtagatcttctttacaaagagggcgatgatcaatacacaaatgttggaaaagtgctcaaagaaagcattgctgctttgcttatagattcaatcccatta

SEQ ID NO: 1351 - DNA, 1896 bp, synthetic construct
  misc_feature 1..1896: note = Description of Artificial Sequence: Synthetic polynucleotide
  source 1..1896: mol_type = other DNA
atggcttttcaccaatttgctccatcatcatccctccctatttggagtagaattaataatcgttttacaccaaaaacttctattattacttctatttcaaaaccaaaatcaaacttgaaatcgagatcgagatcaagtacttgctaccccatacaatgtactgtggtcgataaccctagttctacgattactaataatagtgatcgaagatcagccaactatggacctcccatttggtcttttgattttattcaatctcttccaatccaatataagggagaatcctatacaaggcaattaaataagttgaagaaagaagtgacaagaatggtccttggactggaaattaactctttagccctacttgagctaattgatacattgcaaaggcttggaatatcttaccattttaagaatgaaataaacactattttgaagaaaaaatacactgataattatattaacaataatattattattactaaccctaattataataatttatatgccattgctctcgaatttaggcttctacgccaacatggctatacagtacctcaagaaatttttaatgctttcaaggataagagagggaaatttaaaacatgcttgagtgatgatattatgggagtattgtgtttatatgaagcttcattctatgctatgaaacatgaaaatattttggaggaagcaagaattttttcaactaaatgtcttaaaaaatacatggagaaaatggagaatgaggaagagaaaaaaatattattattagatgataataatattaatagtaatttgctattaattaatcacgctttcgagcttccgcttcattggagaataacaagatcggaagctaggtggttcattgacgaaatatatgagaaaaaacaagacatgaattcgactttgttcgagtttgcgaaattagattttaatatagtgcaatcaacacaccaagaagatttacaacatttatcgaggtggtggagggattgtaaacttggtgggaaattgaattttgctagagatagattgatggaagctttcttatgggatgttggactaaaattcgagggagaattcagctattttagaagaataaatgcaagattatttgtgcttataacaataattgatgatatttatgatgtatatggaactttggaggaattagagcttttcactagtgctgttgaaagatgggatgtgaaattaatcaatgagttaccagattacatgaagatgcctttctttgttttacacaataccataaatgagatggggttcgatgtattagtacaacaaaactttgtcaacattgaataccttaagaaatcgtgggtagatttatgtaaatgttatttacaagaagcaaaatggtattatagtggataccaaccaacattggaagaatacactgagttgggttggctttcaataggagcatcagtaattcttatgcatgcttatttttgtttcacaaatcctataacaaaacaagacttgaaaagtttgcaattgcaacatcattatcccaacataattaaacaagcatgcttgattacaaggcttgcagatgatttaggaacatcttcggatgaattgaatagaggcgacgttcctaaatcgattcaatgttacatgtacgataataatgctaccgaagacgaagctcgtgaacacatcaagttcttgataagtgaaacatggaaggatatgaataagaaagatgaagatgagagttgtttatcagaaaattttgttgaagtttgcaaaaatatggctagaacagcactattcatatatgagaatggagatggacatggttctcagaatagtttatcaaaagaacgtatttcaaccttgattattactccaattaatattcctaaa

SEQ ID NO: 1352 - DNA, 1737 bp, synthetic construct
  misc_feature 1..1737: note = Description of Artificial Sequence: Synthetic polynucleotide
  source 1..1737: mol_type = other DNA
tcaaaatcaaaatcaagtacttgctaccccatccaatgtactgtggtcaataatagtagccctagctctactactaaattttctattgttcgaagatcggcaaattatgaacctccgatttggtctttcgattacattcaatctctttcaacccaatataagggagaatcctatacaaggcaattaaataagttaaagaaagaagtgaaaaggatgctccttcgaatggaagttaactctttagccctactcgagttaatcgatacattgcaaaggcttggaatatcttatcattttaagaatgaaataaacactattttgaagaaaaaatacacaaatacttatattaacaataatattactaaccataattataatttataccccattgctctcgaatttaggcttctacgccaacatggctatgcagttcctcaagaaatttttaatattttcaaagacgtgagtggaaaatttaaagcaatcataaatgacgatgatattatgggaatattggcgttatatgaagcttcattctatgagaaaaatggtgaaagcatattggaggaagctagggttttcacaaccaagtgtctcgaaaattacatgatgataacggaggaaaacaaattagatgatgatgatgatcgtaataatattattgtagtaattagacatgcgttagagcttccacttcattggaggactgcaagaacggaggccaagtggtttatcgatgtatacgagaaaagacaagatatgaattctactttgcttgagtttgcaaaactagatttcaacatggtacaatcaatgcatcaagacgatctaaaacatttgtctaggtggtggagtcatactaaactcggagaaaaactgaattttgtgagagataggttgatggggtgttttttatggaatgttggattaagatttgagccagatttcagctactttaggagaatatctgcaagaatatatgttcttattacaataatcgatgatatatatgatgtttacggaacattagaagaattagagcttttcactcgtgttgttgagagatgggatgtaaaactactaaaagacttaccagattatatgaagatgccttttcttgttttacacaataccattaatgaaatggcattagatgtattaaaagaaaaacactttgtcaacattgaatgcctcaagaaaacgtgggttgatatgtgtagatcttttctacaagaggcaaaatggtactataatggatacacaccaacatttcaagaatacattgaaaatggttggatttcagtaggagcaccagttattcttgtgcatgcttatttctcttttgcaaatcccataactaaagaggttttggaaatcttccaacaaggttatcccacaataattcgtcaatctgccatgatcgtacgtttggcaaatgatctagcaacatcatctgaggaattcgaaagaggtgactcgcctaaatcaattcaatgttacatgcaagaccataatgtatctaaagaggaagctcatgaatacattaagttttcaataagagaaacatggaaggagatgaatagtacttttaatattgaagatggaaattcatcattggttgatgatgccaaaaactttgcaagaatgggattatttatgtatcaacatggagatggacatagttctcaagataatttagcaaaagagcgtatttcgaaattcattatcaatcctata

SEQ ID NO: 1353 - DNA, 1452 bp, synthetic construct
  misc_feature 1..1452: note = Description of Artificial Sequence: Synthetic polynucleotide
  source 1..1452: mol_type = other DNA
cttgaatatattgatgatattcaacgattggggttgtcttattattttgaaaatgaaattgaacaaattttggagcaatttcataataattatcaaaatctaattgattttggtgataataacctttatgctgatgctctttgctttcggttgcttaggcaacaaggttataatattgcatgtgacatattcgacaagtacaagaatgaaaaaggaaaatttaaagaatcaatttcgagtgacattcgaggaatgttgaacttgtatgaagctgcacaaatgagagttcatggagagaaaatactagacgaagcacttatctttacaactactcatcttgaatcctcagttaaaacatgtcaattgagctctccttatctagacctagtgaaacatgccctaatgcaccctattcgaaagagcttacaaagaagagaggcaagactttacatatcactttatcatcaactactttctcatgaggagattcttttaacacttgctaaattagatttcaacttgcttcaaaaactacatcaaaaggaactaagttatattacgaggtggtggaaggagtttgattacaaaagtaagcattcatttataaaagacagaatagtggagtgctatttctgggtttatggagtgttttttgaggcagaaacttcccaaatcagactaataatcaccaaattaattgctattctcacaataattgatgatgcttatgatagctttggttcacttgaagaactagagccttttactcaagcaattgaaaggtgggatatatgtgccatagatactctgcctgagtacatgaaaatattttacatgaaacttttggagatctacaatgaaattgaacaattttctaaggaaagatcatactgccctagctatgctaagaaaggggtgcaatctctaattagagcttattttaaggaagccaaatggttacacacaaaatatataccaacattagatgaatatatgccagttggggttgatagtgcaggatcttttatgctcatttcaatggtttttattggaatgggagatattgttacaaaacattctatggattggatattttctaatcctcaacctaaaattatacaaactatggcaatagttggaagagttatgaatgacattggctaccataagaagaaatcatcaggagaaattgtggcttcaactgtggagtgttacatgaaacaatatggcgtgactggtgaagaagctatagagaaacttagcgaacaagttaaagattcatggaaagatctcaatgaagatcttctcaatccaatcactatctctaggccactcttaatgcaagttctaaagcttgtacgagtgaaccatgagatttatagagaaggagatggctttacacaacccactttgctcaagaatttgattcattctctcatcatcaatccaatt

SEQ ID NO: 1354 - DNA, 1593 bp, synthetic construct
  misc_feature 1..1593: note = Description of Artificial Sequence: Synthetic polynucleotide
  source 1..1593: mol_type = other DNA
atgaaggaaaataatgatgatagtgaaatagttattctgaagaaagaagtgaagaagaaaatacttgagcttgactatgttgaaaacccattagagacacttgaatttattgattcaattcaacgattgggagtgtcgtactattttgaaaatcaaattgaagtagttttgaagaacatatgtaacaaatttcacgaggaaaataatgacgacggtgatctttatgttgttgctcttcgatttcgattggttagacaacaaggttattacatgtcatgtgacgtgttcaacaagttcacgaacaatgaaggaaaattcaaagagtcactttttaacgatattcgaggaatgttaagcttatatgaggcttcacaactaagagtgcatggagagaaaatactagatgatgccctaatattcacaacaaatcacctcgaatctggagctaaaacctcgaaattaagctctcatatttcaaaccaagtaaatcacgcgttgaaaaaccctattcgaaagagcttgcaaaggagacaggctagacattacatgtctttataccatcaaatctcttctcacaatgagcatcttctagctctagctatactagatttcaacttgctacaaaaactttaccagaaggaattaagtgatctcacaaggtggtggaagaagtttgattatgaaagaaggcaatcgttctctagagaaagaataatggattgttacttttggacttttggagtgttttttgaggctcaaacctcacatattaggttgctgatgagcaagttgattgctttgctcactcttgttgatgatatttatgataactttggaacttttcaagagctacacctcttaactgaagcaatacaaagatatatatgtatatatatatatatgagtaggtgggatatgtgtttgattgatcaactaccagagtacattcaaccatgttacaaggaaatcttgaatctttacactgaaattggagaatttactaaggacaaatcatattgccttagctacgctaagaaaggattccaagagctagtaaaagggtactttgaggaagccaaatggttacaccaaaaacataatccaacactagatgagtatatgccaattgcacttgttactgctgcttctcctctactcattgctatttcatttattggaatgccaaatgttgttacaaaagattctatgaattggatcttttctcatccacagcctaaaagtgtgcggactctgtcgatcgttggtagagttcttaacgacattggcttccaccagtggagggaaaggagaacagagaaagtagatttttcagctgtggattgttatataagacaatatggtgtggaagaagaagaagcaatacaaagacttaaagaacaagttagtgattcatggaaagatctgaatgaagagtgtctctatcccaacaatatgaatatcccaatgccacttctaatgagagttcttgatcttgtacggatgaataatgaattatacagagaaggagatggttttacaagagaagctttcatcaaagatttgattgattctctcatcatcaatccctacatc

SEQ ID NO: 1355 - DNA, 1863 bp, synthetic construct
  misc_feature 1..1863: note = Description of Artificial Sequence: Synthetic polynucleotide
  source 1..1863: mol_type = other DNA
aatagtaataataataatgccttcactagatctgtgaaatcatgtttaagttcaaaccataataattataatattattcataataaaactgtattaatgtctaccaataataataataataataataatattatttctcgaagatcagcaaactatcaaccttcactttggcattttgattatgtacaatcactttctacccctttcaaggaaggagcatatgccaaaagagttgagaaagtaaaagaagaggtaagggtaatggtgaagagagcaaaagaggaagagaagcctttatctcaacttgagctaattgatgtattgcaaagacttggaatctcttatcactttgaggatgaaattaatgatatattgaaacatatatataacaacaataatgtgtacaacaccaacaataatgtgtatgccaattctcttgaatttagactcctaagacaacatggttatccggtgtctcaagaaatttttagtacgtgcaaagatgaaagaggcaattttatggtgtgtaccaatgatatcaaaggaatgttatctttatatgaagcttcattctatttggtagaaaatgaagatggtattttggaagagacaagagaaacaacaaagaaatatcttgaggaatacataatcatgatcatggaaaaacaacaatcattattagatcaaaataataataataatgataatgattatgattatgaactagtgagccatgcattggagcttccacttcattggagaatgttaagattggagagtaggtggtttattgatgtgtatgagaagagactagacatgaaccctactctacttaccttagctaaactagatttcaacattgtccaatcaatataccaagatgatcttaaacatgtcttcagctggtgggaaagcactggtatgggaaagaagttggaatttgcaagagatagaacaatggtgaatttcttatggacagtaggagttgcatttgagccacattacaaaaattttagaagaatgattacaaaagtaaatgctttaattacagtaatagatgacatatatgatgtttatggtacactagatgaattggagctcttcactaatgcagttgagagatgggatattagtgctatggatgggctccctgagtatatgaagacatgttttcttgctttatacaatttcataaatgatcttccatttgatgtgttaaaaggagaagaaggcctccatataataaaattccttcagaaatcgtgggcagatctttgcaaatcttatttaagagaagcaagatggtattatgatagatacacaccaagttttgaagagtacattgaaaatgcatggatatcaatatcaggacctgttatactatcacatttatacttttttgtagtgaatccaaacaaggaagatgccttattaagtacttgctttgatggataccctaccataatacgacattcatcgatgattttacgtcttacagatgatcttgcaacttcaacggatgaactgaaaagaggcgatgtttctaaatcagtccaatgcaaaatgcatgaagatggcgtgtttgaagaagaagctcgtcaacatattaagttattaataagtgaaacatggaagcttcttaataaagattacataaatttggatgatgatgatgatggtgatgactactctccaatgttctataagtctaataatattaataaggctttcattgaaatgtgtttaaaccttggtagaatggcacattgcatttatcaatatggagatggacatggaattcaagatcgccaaacaaaagatcatgtactatcattacttattcaccctattccacttacccaa

SEQ ID NO: 1356 - DNA, 1653 bp, synthetic construct
  misc_feature 1..1653: note = Description of Artificial Sequence: Synthetic polynucleotide
  source 1..1653: mol_type = other DNA
atgtcaaatattcaagtcttagcttcatctcaattatgtgacaaaattattgctcgcccaacaacaaaatttcacccttctatttggggtgatcgattcctccattacaatatttcagaacaagacttggtttgcaaacaagaaagagttgaagaattaatacaagttgtaaagaaagagatattatcttcaaatcatgatcaattgaagttgattgacaatctccaacgtttgggattatcatatcatttcgagagtgaaatcgagaaattattggaactattaagtatcggcactcatcatcaaaataataatctacatgatgtttctcttcggtttagactattaagacaaagtggatttaaggtttcatcaagcatatttgaaaaattcaaagacgagaaaggtaactttaaagaaagcctaataaccgatgtttcaggtttgcttagcttgtatgaggcttcgcacttgagttatgttggagaaagcatactagatgaagcacttgctttcacaaccactcaccttaaggctattgtggcaaataataaagatcatccattatcacatcaaatatccatagccttggaaaggcctctaagaaagaccatagagaggcttcatgctaggttttacatctcaatctatgaaaaggatgcctctcataacaaactattgctagagcttgcaaagttagacttcaatgtacttcaatgtttccacgaaaaggaacttagtgaaattatgaggtggtggaaggagcatgagtttgtaaagaaattcccttttgcaagagataggatggtggaactatatttttggatattgggtgtatattatgaacccaaatactctcgagcaagaaagcttttgaccaaagtcattgcattgacctcaatcactgatgatacttatgatgcatatggtactattgatgagcttgagcttcttaccaaagcaattcaaaggtgggacataacttgtatggataaacttgagccagaatatttaaagacatattataaggtaatgttggaatcttatgaagaatttgaaaaggagcttaaaaaggaagaattatacaaactcgagtatgcaaaagaagagatgaaaagaactattggaggttattttgaagaagctcgatggttgaatgaaggatatttcccaagcttcgatgagcatttgagagtttcatatgtttcttctgctaacgttttgttgatagccacaagttttgtaggaatgcatgatattgtaacacatgaaactctagattggctctctaaagaccctaagattgtttcagcttccactctcctctcaagattcatggatgacataggctctcgcaagtttgagcaagagagaaatcacataccatctacagtggattgttacatgaaacaatatggagtatcagaggaagaggcaattaaagaacttaataaaagagtgatcacccactggaaagaaattaatgaagactttattaggccaactgttgtgccttttcctatcttacttcgtgttcttaattttacaaaagtaatagatcttttttacaaagagggtgatgatcaatacacacgtgttggaaaagcgctcaaagaaagcattgatgctttgcttatagattcaatcccatta

SEQ ID NO: 1357 - DNA, 1668 bp, synthetic construct
  misc_feature 1..1668: note = Description of Artificial Sequence: Synthetic polynucleotide
  source 1..1668: mol_type = other DNA
atgtcatatcaagttttagcctcatcacaaaatgacaaagtatcaaaaattgttcgtccaacaacaacttatcaaccttctatttggggggagagatttctccaatatagtatttcagaccaagatgtaagctataaaaagcagcgagttgacgaattaaaggaagtggtaaggagagaggtatttttagaatgttatgataatgtttcatatgtgttgaagatagtggatgatgttcaacgtttgggattgtcgtatcattttgaaagtgaaatagaaagagcgctacaacacatttacgataacactattcatcaaaaccacaaagatgaagatttacatgacacttctacccgctttagactattgcgccaacatggatttatggtttcatctaatatatttaaaatatttaaagatgagaaagggaattttaaggagtgcttgataactgacattcccggtttgttgagcttatatgaggcctcacagttaagctatattggagagaatatattagatgaatcacttgctttcaccaccactcaccttcatcagtttgtgaaaaatgaaaaaacacatccattatcaaatgaagtattactagccttgcagagacctataagaaagagcctagataggctccacgctaggcattacatttcatcttacgaaaacaagatttgtcataacaaaacattgctagaacttgcaaagttggatttcaatctattacaatgtttgcatagaaaagagcttagtgaaatttccaggtggtggaaagaaatagactttgtacacaaactaccttttgcaagagataggattgtggagctatacctttggctattaggagtttttcatgaacctgaattttcacttgcaagaaatatttcaacaaaagtcattgcattggcctcagttgcagatgatatttatgatgcatatggtacatttgaagagcttgagctccttactgaatcaattaataggtgggacttaaattgtgcggatcaactacgtccagaatgtttacagacattttataaggttcttttaaattgttatgaagaatttgagagtgagcttggaaaggaggaaagttacaaagtttactatgcaagagaagcgatgaaaagattacttggagcatatttcagtgaagctcgatggttgcacgaaggatatttccctagtttcgatgagcatttgaaggtttcattgatttcttgtggatacaccatgatgatagtgacctctttaattggaatgaaagattgtgtaacaaaacaagattttgagtggctctcaaaagaccccaagataatgagagattgcaatatcctttgtaggttcatggatgacatagtctctcataagtttgagcaacaaagagatcattcaccgtctaccgttgagagttacatgaggcaatatggggtgtcagagcaagaggcatgtgatgagctaagaaagcaagtggttaattcatggaaagaaataaacaaagcattcctcaggccttctaatgtgccttatccagttttatctcttgttctcaatttttcgagagtaatggatcttctctacaaagatggtgatggctatacgcatgttggaaaagagacaaaaaatagtgttgttgcgttacttatagatcaaatccca

SEQ ID NO: 1358 - DNA, 1719 bp, synthetic construct
  misc_feature 1..1719: note = Description of Artificial Sequence: Synthetic polynucleotide
  source 1..1719: mol_type = other DNA
tcaagtgcatgctaccccatcatatgtgctgtggtcaatagttctaatgcaattattgatcgacgatctgccaactttgagccctccatttggtcttttgattatattcaatctcttacaagccaatataaggaagaatcttatacaggtcgagtcaaagaattggagatagatgtgaaaaagatgttaattgagatggaaaattctttaattcaacttgaactcattgacacattgcaaagacttggagtatcttatcgttttgaggatgaaataaatactattttgaaagaaaaatatattaatatgatcaataaccctaattataataatttatatgtcactgctcttgaatttaggcttctacgtcaacatggctatgcagtacctcaagagatttttaatcattttaaggaagagataggaaaaatcaaagcgaacatgattagtgatgatattatggaagtattggccttatatgaagcttcattctatgagaaaaaaggcgaaagtattttagaagaagttagaattttcacaactcaatatctaaagaactacattataatgatatcacaagaaagaaagttaatgattgataatgataatgattatgattatgatatcgaaatagtgaatcacgctttggagctcccacttcatcggaggactacaagaacagaagctaagtggttcatcgacgcgtatgagaaaaaacaagacatgaatcctattttgcttgagtttgctaaactcgatttcaacatgatacaatcaacacatcatgacgatctaaaacatatattcaggtggtggaggcatactaaacttggggagttgaattttgcaagagatcgattgatggaatgtttcttatggaaaattggaataagatttgagccaaaattcagttattttagaataacaactgccaaattatttgagctaataacagtaattgatgatatatatgatgtttatggaacattggatgaattagagcttttcaccaaagctattgagagatgggatatggaaatgataaatgagttaccagaatatatgaagatgccttatattgttttacacaataccattaatgaaatggtatttgaggtattaagagaccaacacatctccatcaacattcaataccttaagaaaacgtgggtagatatgtgtagaggttttttacaagaggcaaaatggtactatagtggatatacaccaacactagaagaatatattaaaaatggttggatttcagtgggagcaccggttctaattgtgcatgcttatttttctcatgcaaattataatcacacagttacaagtagtaaagagattttcgaatgctttgaacatggttattatcccgccataattcgtcatagtgccataatattacgacttacaaatgacctagcaacatcatcggaggaactgaaaagaggtgatgctccgacatcaattcaatgttatatgcaagaaaaaaaagtatctgaggagaaagctcgtgaacatattaagtttttaataagtgaaatatggaaagagatgaataatgatgttggattatatccaatctcattgattgaagatgctacaaattttgctaagatgggatttttcatgtatcagcatggtgatggtcatagttctcaagataatcaatccaaacaaaaaatttcatccttgattattgaacctattccctta

SEQ ID NO: 1359 - DNA, 1689 bp, synthetic construct
  misc_feature 1..1689: note = Description of Artificial Sequence: Synthetic polynucleotide
  source 1..1689: mol_type = other DNA
agtactccaatattcaaagatcaaccagcagcaattgtccggcgatcaggcaactacaaacccacattgtgggatgctcattttttcaattcactccaagtcatatatacggaggaaagctatgggaaaagaatcaatgagctgaaagaagatgtgagaagaattcttgagaaggaggctgaaaatcctttagttaagcttgaacagatcaatgatttgagcagacttggaatatcttatcactttgaaaatcaaattaaaacaatattaaacctgacatttaacaataataatgcattgtggaagaaagataatctgtatgccactgctcttcatttcaaactccttagacaatatggattcagtcctgtatcttcagaggttttcaatgtcttcaaagacgagaaaaatgagttcaaggagaatttaagtaaggatgtgaaaggaatggtatgtctatatgaggcttcattctattcatttaggggtgaacccatattagatgaagcaagagatttcacaaccaaacatctcaaacaatacttgatgacgaggcaatgtcaaactaaatctgttgaccatgatgatgatgatgatcttgtgaaacttgtggagcatgccttggatcttccactccattggagattgccaagattggaggctaggtggtttattgatatgtatgctgaaaggaattatgatatgaatccaacttttcttgactttgctaaacttgactataacttcgttcagtcagcataccaaaaagagctcaaatatatttcaaggtggtggagtggttctagattgacagaaaggctaccatttgctagagacagagtagtggaaattttctattctgcagtggcactgaaatatgaggcagaatttgggtttgttagaactgtgatgacaaaaattggtctcttgctaacactcatggacgatatatatgatgtgtatggtacactagatgagcttcagctttttctagaggcaattgagaggtggaatataaatgaactggatcagctacccgattacatgaagatattgtttgttgctttttataacaatgtgaatgagatatcttattatgtcctcaaagaaaatgggattcacaccatcaaatatctaaagaaagcgttgggtgatctgtgtaaatgctatatggaggaggcaaaatggtttcacagtggacacataccaagtttagaagaattcattgagaatggatggaaatcaattacaatacctctttgtcttatctatcattattgcttaattacaacttcaattacagaacaagacatggaacacttgcttcaatatccaaccattttacgtgtctcaggaactgtttttcgatttatagatgacttgggaacctcatcagatgaacttgaaagaggagataatccttcatcaattcaatgctacatgcgtgaaaagggtgttagtgaaaatgaaagccgtgaacacatatggaatttaataagtgaaggatggaaagaaattaatgaagttaaagcttcaacctctccatactctcaagtgtttattgaatctgccattgattttgttagaggagcaatggagatgtaccacaagggtgatggttttggtactaatcaagatcggtatcttaagaccaaagttgtcaacatgttcttcgatccaattccaatt

SEQ ID NO: 1360 - DNA, 1635 bp, synthetic construct
  misc_feature 1..1635: note = Description of Artificial Sequence: Synthetic polynucleotide
  source 1..1635: mol_type = other DNA
cgtcgatcggccaattttcatcctagtatctggggagatcactttctcaaatatacccatcaatcattggaagttgatgataatacaaagcaagaagttgaaaaactaaaagaggaagtgagagggatgctaactgctgcccccagcattaattcttcccaaaagctacagttaattgatacaatccaacggttaggagtcgcttatcattttgagagcgaaatcagtgacattttgggaaaaatgaagaaaatcaatcctcacactgaattggataatagtacccttcatacggtctccctttggtttcgattgcttagacaacaaggatacaacatatcaagtgatatatttgagaagtttacaaacaaaaaaggaaaactggacgatagtgttagtagtgatgttgaaggaatgctaagcttgtatgaagcttcacatatgagaatccatggagagcctatacttgaagaagcagtagttttcaccacaactcatttggtggaggcctctaaggagaaatcccagttgaccatgagctcattatttcttgcggcacaagtcaaccatgccttaagacagcccatcttgaagggcttgccaagagtagaaattcaacgctttatttctctctatcatcacgaccctaaccacagtcatcttttgcttcgctttgctaaattggacttcaacgttctccaaaagttgcaccagaaggaacttcatgaaatttcaaagtggtggaaagacttggactttgcatcgaagctacctttcgcacgtgacagactagtcgagggttatatttggcctgtgggagtatactttgagccaaagtacagtgctgctagggttatattgacaaaagtaattggtgtgacaacaatgattgatgacatttatgatgtttatggaactttagaagaactggaactcttcacagacgcaatagaaaagtgggatataagctgcagtgatcaactccctgattacatgaaatattgttacgaggcactgttaaaattatacgatgaaattgaggaggagttggccatgcaaggcagaacttatcggatggcctatgcaaaggagacaatgaagaagctagctcaatcctactacgtggaagctcaatggtttcataaaaagtacacaccaacgttacaggaatatatggaggttgcactggtgtcatccacgtactacatgctcactgccacgtcattcctaggaatgggagaagaagtctcagctgaggtctttcattggcttatgaactctcctaagattgtaacagcatcagcagtagtttgcagactcatggatgatgtggtcagccacaagtttgagcaagatagaggacacgtggactctagcgtggaatgttatatgaagcaatataatgtaagagaagaagaagcgtgcaaagaattgaagaaacaagttttagatgcatggaaagaaatgaatgaggagtgcatggagccaagagatgtgcccatgtctgtcctcatgcgcgtggtcaatctcggacgagtgatcgatgctgtttacaaagatggagacggttacacccatgccggaggaatcatgaagacttttgtcaaatctttgtttattcaaactcttcccctc

SEQ ID NO: 1361 - DNA, 1656 bp, synthetic construct
  misc_feature 1..1656: note = Description of Artificial Sequence: Synthetic polynucleotide
  source 1..1656: mol_type = other DNA
atgtcaaatattcaagtcttagcttcatctcaattatgtgacaaaattattgctcgtccaacaacaaattttcacccttctatttggggtgatcgattcctccattacaatatttcagaacaagacttggtttgcaaacaagaaaaagttgaagaattaatacaagttgtgaagaaagagatattatcttcaaatcatgatcaattgaagttgattgacaatctccaacgtttgggattatcacatcattttgagagtgaaattgagaaattgttggaacaattaagtatcggcactcatcatcaaaatcatcatgatctacatgatgcttctctttggtttagattattaagacaacatggatttaatgtttcatcaagtatatttgaaaaatttaaggacgctgaaggtaattttaagaaaagcttgataaccgatgtatcgggtttacttagtttgtatgaggcttcacacttgagttatgttggagaaagcatactagatgaagcacttgctttcacaaccactcaccttaaggctattgtggcaaatagtaaagatcatccattatcacatcaaatatccatagccttgcataggcctctaagaaagaccatagagaggcttcatgctaggttttacatctcaatctatgaaaaggatgtctctcataacaaagtattgctagaccttgcaaagttagatttcaatctacttcaatgtttccacaaaaaggaacttagtgaaattatgaggtggtggaaggagcatgagtttgtaaagaaattcccttttgcaagagataggatggtggaactgtatttttggatattgaatgtatattatgaacccaaatactctcgagcaagaaagcttttgaccaaagtcattgcattgacctcaatcactgatgatacttatgatgcatatggtactattgatgagcttgagcttcttaccaaagcaattcaaaggtgggacataaattgtatggataaacttgagccagaatatttaaagacatattataaggtaatgttggaatcttatgaagaatttgaaaaggagcttaaaaaggaagaattatacaaacttgagtatgcaaaagaagagatgaaaagaactattggaggttattttgaagaagctcgatggttgaatgaaggatatttcccaagcttcgatgagcatttgagagtttcatatgtttcttctgctaacgttttgttgatagccacaagttttgtaggaatgcatgatattgtaacacatgaaactctagattggctctctaaagaccctaagattgtttcagcttccactctcctatcaagattcatggatgacataggctctcgcaagtttgagcaacagagaaatcacataccatctacagttgattgttacatgaaacaatatggagtatcagaggaagaggcaattaaagaacttaataaaagagtggtcacctactggaaagaaattaatgaagactttattaggccaactgttgtgccttttcctatcttacttcgtgttcttaattttacaaaagtagcagatcttctttacaaagagggtgatgatcaatacacaaatgttggaaaagtgctcaaagaaagcattgctgctttgcttatagattcaatcccatta

SEQ ID NO: 1362 - DNA, 1668 bp, synthetic construct
  misc_feature 1..1668: note = Description of Artificial Sequence: Synthetic polynucleotide
  source 1..1668: mol_type = other DNA
atgtcatatcaagttttagcctcatcacaaaatgacaaagtatcaaaaattgttcgtccaacaacaacttatcaaccttctatttggggggagagatttctccaatatagtatttcagaccaagactttagctataaaaagcagcgagttgacgaattaaaggaagtggtaaggagagaggtatttttagaatgttatgataatgtttcatatgtgttgaagatagtggatgatgttcaacgtttgggattgtcgtatcattttgaaaatgaaatagaaaaagcgctacaacacatttacgataacactattcatcaaaaccacgaagatgaagatttacatgacacttctacccgctttagactattgcgccaacatggatttatggtttcatctaatatatttaaaatatttaaagatgagcaagggaattttaaggagtgcttgataactgacattcctggtttgctgagcttatatgaggcctcacatttaagctatattggagagaatatattagatgaagcacttgctttcaccaccactcaccttcatcagtttgtgaaaaatgaaaaaacacatccattatcaaatgaagtattactagccttgcagagacctataagaaagagcctagagaggctccacgccaggcattacatttcatcttacgaaaacaagatttgtcataacaaaacattgctagaacttgcaaagttggatttcaatctattacaatgtttgcatagaaaagagcttagtcaaatttccaggtggtggaaagaaatagactttgtacacaaactaccttttgcaagagataggattgtggagctatacctttggctattaggagtttttcatgaacctgaattgtcactggcaagaattatttcaacaaaagttattgccttggcctcagttgcagatgatatttatgatgcatatggtacatttgaagagcttgagctccttactgaatcaattaataggtgggacttaaattgtgcggatcaacttcgtccagaatgtttacagacattttataaggttcttttaaattgttatgaagaatttgagagtgagcttggaaaggaggaaagttacaaagtttactatgcaagagaagagatgaaaagattacttggagcatatttcagtgaagctcgatggttgcacgaaggatatctccctagcttcgatgagcatttgaaggtttctttgatttcttgtggatacaccatgatgatagtgacctctttaattggcatgaaagattgtgtaacaaagcaagattttgagtggctctcaaaagaccccaatataatgagagattgcaatatcctttgtaggttcatggatgacatagtctctcataagtttgagcaacaaagagatcattcaccgtctaccgttgagagttacatgaggcaatatggggtgtcagaacaagaggcatgtgatgagctaagaaagcaagtgattaattcatggaaagaaataaacaaagcattcctcaggccttctaatgtgccttatccagttttatctcttgttctcaatttttcgagagtaatggatcttctctacaaagatggtgatggctatacgcatattggaaaagagacaaaaaatagtgttgctgcgttacttatagatcaaatcccg

SEQ ID NO: 1363 - DNA, 1713 bp, synthetic construct
  misc_feature 1..1713: note = Description of Artificial Sequence: Synthetic polynucleotide
  source 1..1713: mol_type = other DNA
attacaggactaatctccactactactttcaaagaacaaccagcaatagtccgtcgatcaggaaactacaaacccccattgtgggatgctcattttatccaatcactccaagtcatatatacggaggaaagctatgggaaaagaatcaatgagctgaaagaagatgtgagaagaattcttgagaaggaggctgaaaatcctttagttaagcttgaacagattaatgatttgagcagacttggaatatcttatcactttgaagatcaaattaaggcaatattaaaccttacatataataataataatgcattgtggaagaaagataatctgtatgccactgctcttcatttcaaactccttagacaatatggattcaatcctgtatcttcagagattttcaatgctttcaaagacgagaaaaaggagttcaaggagagtttgagtaaagatgtgaaaggaatggtatgtctatatgaggcttcattctattcatttaggggtgaacccatattagatgaagcaagagatttcacaaccaaacatctcaaacaatacttgatgatgacgaggcaaggtcaaaatgttgaccatgatgatgataatgatttaatggtgaaattagtggagcatgctttggagcttccagtgcattggagaatgaaaaggttggaggcaaggtggtttattgatatgtatgctgaaatgtctcatcatcatcatatgaattcaacttttcttcaacttgctaaactagattttaacgttgtacaatcaacataccaagaagaccttaaacatgttgtaaggtggtggaaaactactagtctaggagagaggttaccctttgcaagagataggatagttgaaattttcttatggagtgtgggacttaaatttgagccacagtttagatattgccgaaaaatgctcacaaagattggtcaattggtaacgacaatggacgatatatttgacgtgtatggtacgcttgatgagctaagcctctttcaacacgcattgggaaggtgggatataaatacgatcgaccaacttccagattacatgaagatattttttttggctacttataatgtggtgaatgaaatggcgtatgacgtgctaaaacaaaatggcattctcattatcaaatatttaaagaaaacgtggacggatttatgtaaatgttacatgttggaggcaaattggtatcatagtggatacacaccaagcttggaagaatacattaaaaatggatggatatcaattgcagaacccttaattctagtcaatctttattgccttataaccaatccaataaaagaagatgacatagactgcttgcttcaatatcccacctttattcgtatctcaggaatcattgctcgacttgttgatgatttaggaacttcatcggatgaactgaaaagaggagacaatcctaaatcgattcaatgctatatgaaagaaaatggtatttgtgatgaaaagaatggccgtgaacacataaggaatttaatcagtgaaacatggaaggaaatgaatgaagctcgagtgggtgagtctccattttctcaagcttttattgaaactgccatagatttcgttaggacagcaatgatgatataccaaaaggagcaagatggggttggtactaatattgatcattacacaaaagatggaatcatttccttgttcttcacttccattcccatt

SEQ ID NO: 1364 - DNA, 1854 bp, synthetic construct
  misc_feature 1..1854: note = Description of Artificial Sequence: Synthetic polynucleotide
  source 1..1854: mol_type = other DNA
atggcttttcaccaatttgctccatcatcatccctccctatttggagtagaattaataatcgttttacaccaaaaacttctattattacttctatttcaaaaccaaaatcaaacttgaaatcgagatcgagatcaagtacttgctaccccatacaatgtactgtggtcgataaccctagttctacgattactaataatagtgatcgaagatcagccaactatggacctcccatttggtcttttgattttattcaatctcttccaatccaatataagggagaatcctatacaaggcaattaaataagttgaagaaagaagtgacaagatggcttggactggaaattaactctttagccctacttgagctaattgattacattgcaaaggcttggaatagcttaccatttaagaatgaaataaacactattttgaaggaaaaatacacggataattatattaacaataaaattattactaaccctaattataagaatttatatgccattgctcgcgaatttaggcttctacgccaacatggctatacagtacctcaagattttaatgctttcaaggataagagagggaaatttaaaacatgcttgagtgatgatattatgggagtattgtgtttatatgaagcttcattctatgctatgaaacatgaaaatattttggaggaagcaagaattttttcaactaaatgtcttaaaaaatacatggagaaaatggagaatgaggaagagaaaaaaatattattagatgataataatattaatagtaattgctataattaatcacgctttcgagcttcgcttcattggagaataacaagatcggaagctaggtggttcattgacgaaattatgagaaaaaacaagacgtgaattcgacttgtttcgaggttgcgaattagattttaatatagggcaatcaaacaccaagaagatttacaacatttatcgaggtggtggaggggattgtaaacttggtgggaaatgaattttgctagcgatagattgatggaagctttcttatgggatgttggaaaattcgaggagaatttcagctattttagagaataaatgcaagattatttgtgctttataacaataattgatgatatttatgatgtatatggaactttggaggaattagagcttttcactagtgctgttgaaagatgggatgtgaaattaatcaatgagttaccagattacatgaagatgcctttctttgttttaaataccataaatgagatggggttcgatgtattagtacaaaactttgtcaacattgaataccttaagaaatcggtatgtagattatgtaaatgttatttacaagaagcaaaatggtattatagtggataccaaccaacattggaagaatacactgagttgggttggctttcaataggagcatcagtaattcttatgcatgcttattgtttcacaaatcctataacaaaacaagacttgaaaagtttgcaattgcaacattatcccaacataattaaacaagcatgcttgattacaaggcttgcagatgatttaggaacatctcgggatgaattgaatagaggcgacgttcctaaatcgattcaatgttacatgtacgataataatgctaccgaagacgaagctcgtgaaatcaagttcttgataagtgaaacatggaaggatatgaataagaaagatgaagatgagagttgtttatcagaaaattttgttgaagtttgcaaaaatatggctagaacagcactattcatatatgagaatggagatggacatggttctcagaatagtttatcaaaagaacgtatttcaaccttgattattactccaattaatatc

SEQ ID NO: 1365 - DNA, 1695 bp, synthetic construct
  misc_feature 1..1695: note = Description of Artificial Sequence: Synthetic polynucleotide
  source 1..1695: mol_type = other DNA
agtactccaatattcaaagatcaaccagcagcaatcgtccgccgatcaggaaactacaaacccacattgtgggatgctcattttttccaatcactccaagtcatatatacggaggaaagctatgggaaaagaatcaatgagctgaaagaagatgtgagaagaattcttgagaaggaggctgaaaatcctttagttaagcttgaacagatcaatgatttgagcagacttggaatatcttatcactttgaagatcaaattaagacaatattaaacctgacatttaacaataataatgtattgtggaagaaagataatttgtatgccactgctcttcatttcaaactccttcgacaatatggattcagtcctgtatcttcagaggttttcaatgccttcaaaaacgagaaaaaggagttcaaagagagtttgagtaaggatgtgaaaggaatggtatgtctatatgaggcttcattctattcatttaggggtgaacccatattagatgaagcaagagacttcacaaccaaacatctcaaacaatacttgatgacaaggcaaagtcaatttactagagttgaccatcatgatgatgatgatcatgatcttgtgaaattggtagagcatgccttggatcttccactccattggagattgccaagattggaggctaggtggtttattgatatgtatgctgaaaggaattatgatatgaatccaacttttcttgactttgctaaacttgactataacttcgttcagtcagcataccaaaaagagctcaaatatatttcaaggtggtggagtggttctagattgacagaaaggctaccatttgctagagacagagtagtggaaattttctattctgcagtggcattgaaatatgaggcagaatttggatttgttagaactgtgatgacaaaaattggtctcttgctaacactcatggacgatatatatgatgtgtatggtacactagatgagcttcagctttttctagaggcaattgagaggtggaatataaatgaactggatcagctacccgattacatgaagatattgtttgttgctttttataacaatgtgaatgagatatcttattatgtccttaaagaaaatgggattcacatcatcaaatatctgaagaaagcgttgggggatctgtgtaaatgctatatggaggaggcaaaatggtttcacagtggacacataccaagtttagaagaattcattgagaatggatggaaatcaattacaatacctctttgtcttatctatcattattgcttaattacaacttcaattacagaacaagacatggaacacttgcttcaatatccaaccattttacgtgtctcaggaactgtttttcgatttatagatgatttgggaacctcatcagatgaacttgaaagaggagataatccttcatcaattcaatgctacatgcgtgaaaagggtgttagtgaaaatgaaagccgtgaacacatatggaatttaattagtgaaggatggaaggaaattaatgaagttaaagcttcaaactctccatactctcaagtgtttattgaatctgccattgattttgttagaggagcaatggagatgtaccacaagggtgatggttttggtactaatcaagaccgatatcttaagaccaaagttgtcaacatgttcttcgatccaattccaatt

SEQ ID NO: 1366 - DNA, 1761 bp, synthetic construct
  misc_feature 1..1761: note = Description of Artificial Sequence: Synthetic polynucleotide
  source 1..1761: mol_type = other DNA
atgcaaatggcaggagtgaagttcattagctactcatctttatactcggctactttctcaaagaggccatcgaagaagaattataagcttcctcgttttggtaatccattattcatgtcaacaaaatgccagagtatatcatcatcatcatcaccaccaccattattgtcaatagatcatgatccaggggacatagaatggattttattgaataattagatggtcgctgattattatgacaattataagagtactacctcggaagagctgttgatcaaaaaggttgaaatggcattacgaaaacctactgatgatcaaagttacaaaatgaggctcatagatagcatccaacggttgggagttggccattatttcgaagaagaaatcaaagtaatccttcagatgttgtcagatttcaattccggccaagatgacctctttaacacggggcttcgttttcggctactcaggcataatggctttccaactacctcagatgtttttgacaaattcatcaaccaaaaaggagaaatagaggatgtaataatgggccaagacacattgggtatgctgagcttgtatgaggcatcctaccttgcagcaaattgtgaagaatcattggtgaaggcaatggaattcacaagatctcatctgaaaagttcgatgcctttcataacccaaaagctacaaaatgaagttgccaaagccttggagctccctagacacctgaggatggcaccattagaagctcgaaactacatcgacgaatatggcaaagaattaaaccactgccctgctcttcttgacttagccaagttagaatttaacgagcttcagtcactccacaaaagagaattaaccgagatcataaggtggtggaaacagttgggtctggttgagaaacttggttttgcaagagatcgacccttagaatgttttctatgggtagtgggaatattccctgggaaatgctattccaacgtccggattgagctggccaaaactgtttcaatcttactagtcattgatgatatctacgacacttacggatctttggatgaactccacttgttcaatcatgcaattctaagatgggatcttggtgcaatggacaagcttcctgagtacatgaaaatatgttacatggcactatacaatactactaatgaaattggctacagagttctcaaagaacatggattatgcgttacacaacacttaaagaaagtgtggttagacatatttgatgcatttctaaccgaagcagaatggttcgacaaaaaatacactccaactctagagcaatatttaacaaacggcgtaactagtggaggatcctacatggccttagtgcactcatttttcctcataggtcatggtattacagaccaaactatatcaatgatgcacccatatcctgagatcttctcccactcaggcaaaattctaagactttgggatgatttgggaacagccaaggaggagcaagagagaggagatgttgcttctagcatagattgttatatgaaagaagagaatattgaatcggaagatgaggccagaaaacacatcaagaaactgattagaagctcgtggatagagctaaacggagagttgaaggctcctagtgcattgcctcggtcgatcaccacggcctgttttgaccttgctagaacagcccaagtcatctatcaacatggagatgatcaaagctttttaagcgtagaagatcatgtacaatctttgttttttcgaccctgt

SEQ ID NO: 1367 - DNA, 1710 bp, synthetic construct
  misc_feature 1..1710: note = Description of Artificial Sequence: Synthetic polynucleotide
  source 1..1710: mol_type = other DNA
atgtccaaccaaataatattggcatcatcaaaaaatgagaaaatacataaaattgttcgaccaacaaaaaattatcatccatctatttggggagatcgatttctacattacaatatttcagaagaagagttgagttataaacaaggccaagttgaagaattgaaagaagtagtaagaaaggagatatttggagaattattatgtgatgattggaataatcgattgaagttaattgatgtggtagaacgtttgggattgtcctatcattttgagagtgaaatacaaaatgagcttcaacaaatttacaacaaaataaggattaatgatactaatttaaaacatgaaactttgcatgatgcttctattcggtttagacttctacgacaacatggatacagggtttctttagatatatttgacaagttcaaagatgagaatggcaactttaaagaatgtttggcgagtgacactcttggtttgcttagcttatatgaggcctcacatttgagttgcgtcggggaagatttactaaatgaagccttgtcttttacgaccagacacctaattgagtttttggcaaataataaaaaagaacaatgcgatgatgatgatgatcttttatcgaaagaaatatctcgagccctggagagacccttaagaaaaaccctaaacaggctccaagctaggcatttcatttcaatatatgaaaaagtggccttacataaccaagcattgctacaacttgcaaaattagatttcaatttattacagtccatgcacaaaaaggagcttagcgaaaactccaggtggtggaaagaatcagactttgtacacaaattcccttttgcaagagacaggagtgtggaactatacctttggatattagcagtctattatgaaccccaatactatttggcaagaataattttattcaaaattatttcctttgccacaatagctgatgacatttatgattcatatggtacttttgaagaacttaaactcctaactgatgtagttaaaaggtgggacataaatgagattgataaactcaatccaggatgttttcaagtattttataaagaacttttgatttgttatgaagaatttgagcaagggcttacaaaggaagaaacttacagagttcattacgcaaaagaagagtttaaagaatttctccaaggttatctggatgaagcttggtggttaaagaaagctgaacgcattccaagttttgatgagtatttgaaatttggtttggtcaattgtggttacttaatgttgacagtgagctctttaattggaatgaaaagtaacaatattgtaaccaaacaagtttttgagtggctctccaaaggccccaagattatcaatgcatccactactatttgtcggcttatggatgacatagctgaacacaagaatgagcaagagagaaatcatgtaccatctacaatagaatgttacatgaaacaatatggcgtatcagaagaagaaacatgtgatgaaatgaataggcgagtggttattgcatggaaagaaataaacgaagagtttctgaaaccaactgaagcagcttcacctatattagttcgtgccctgaatcttgcaagggttatagatcttctctacaaaaatggtgataactatacacaagttggaaaagttaccaaagataacgttgctgtcttgctcattgattcaattcca

SEQ ID NO: 1368 - DNA, 1857 bp, synthetic construct
  misc_feature 1..1857: note = Description of Artificial Sequence: Synthetic polynucleotide
  source 1..1857: mol_type = other DNA
atagcttttcaccaatttgcttcatcatcatccctccctatttggagtagtattgataatcgttttacaccaaaaacttctattacttctatttcaaaaccaaaaccaaaactaaaatcaaaatcaaacttgaaatcgagatcgagatcaagtacttgctaccccatacaatgtactgtggtcgataaccctagttctacgattactaataatagtgatcgaagatcagccaactatggacctcccatttggtcttttgattttgttcaatctcttccaatccaatataagggtgaatcttatacaagtcgattaaataagttggagaaagatgtgaaaaggatgctaattggagtggaaaactctttagcccaacttgaactaattgatacaatacaaagacttggaatatcttatcgttttgaaaatgaaatcatttctattttgaaagaaaaattcacaattaataatgacaaccctaatcctaattatgatttatatgctactgctctccaatttaggcttctacgccaatatggatttgaagtacctcaagaaattttcaataattttaaaaatcacaagacaggagagttcaaggcaaatataagtaatgatattatgggagcattgggcttatatgaagcttcattccatgggaaaaagggtgaaagtattttggaagaagcaagaattttcacaacaaaatgtctcaaaaaatacaaattaatgtcaagtagtaataataataatatgacattaatatcattattagtgaatcatgctttggagatgccacttcaatggagaatcacaagatcagaagctaaatggtttattgaagaaatatatgaaagaaaacaagacatgaatccaactttacttgagtttgccaaattggatttcaatatgctgcaatcaacatatcaagaggagctcaaagtactctctaggtggtggaaggattctaaacttggagagaaattgcctttcgttagagatagattggtggagtgtttcttatggcaagttggagtaagatttgagccacaattcagttactttagaataatggatacaaaactctatgttctattaacaataattgatgatatgcatgacatttatggaacattggaggaactacaacttttcactaatgctcttcaaagatgggatttgaaagaattagataagttaccagattatatgaagacagctttctactttacatacaatttcacaaatgaattggcatttgatgtattacaagaacatggttttgttcacattgaatacttcaagaaactgatggtagagttgtgtaaacatcatttgcaagaggcaaaatggttttatagtggatacaaaccaacattgcaagaatatgttgagaatggatggttgtctgtgggaggacaagttattcttatgcatgcatatttcgcttttacaaatcctgttaccaaagaggcattggaatgtctaaaagacggtcatcctaacatagttcgccatgcatcgataatattacgacttgcagatgatctaggaacattgtcggatgaaatgaaaagaggcgatgttcctaaatcaattcaatgttatatgcacgatactggtgcttctgaagatgaagctcgtgagcacataaaatatttaataagtgaatcatggaaggagatgaataatgaagatggaaatattaactcttttttctcaaatgaatttgttcaagtttgccaaaatcttggtagagcgtcacaattcatataccagtatggcgatggacatgcttctcagaataatctatcgaaagagcgcgttttagggttgattattactcctatccccatg

SEQ ID NO: 1369 - DNA, 1782 bp, synthetic construct
  misc_feature 1..1782: note = Description of Artificial Sequence: Synthetic polynucleotide
  source 1..1782: mol_type = other DNA
gtattttttagaccaaaattatatactaattataatattattaatggtggtacaaaatcaagattatcaagtgcatgctaccccatccaatgtgctgtggtcaatagttctaatgcaattattgatcgacgatcagccaactttgagccctccatttggtctttcgattatattcaatctcttacaagtcaatataagggagaaccttatacaagtcgagtgaaaaaacttgagagagatgtgaaaaaaatattagttgagatggaaaactctttagctcaacttgaactcattgatacattgcaaagacttggaatatcttaccgttttgagaatgaaataaattctattttgaacaaaaaatatctcaatattaataatcctaattataatttatatgctattgctcttcaatttaggcttctacgtcaacatggctatgcagtacctcaagaaatttttaatcagttgaaggacgagatagaaaaaatcaaagaaaacataaatggtaatgatatcatgggaatattagccttatacgaagcttctttttatgagaaaaaagacgaaagtattttaaaggaagctagaattttcacaactaaatgtctcaaaaactacactataatgatatcagagcaaaaaaagttaatgattgataatgattatgattatgatatcgaagtagtgaatcatgccttagagctcccacttcatcggaggaccacaagaacagaagcaaagtggttcattgacgcatatgcgaaaaaacaagacatgaatcctatgttgcttgagttagccaaactcgatttcaacatagtacaatcaacacatcatgaagatctaaaacatatattcaggtggtggagacatactaaacttggagagaaattgaattttgcaagagatcgattgatggaatgtttcttatggaatattggaataagatttgagtcaaaattcagctattttagaacaaaaactgccaaattatttgagctagtaacatttatagatgatatatatgatgtttatggaacattggatgaattagagcttttcaccaaagctgttgagagatgggatgtgaaaatgataaatgagttaccagaatacatgaagatgccttatcttgttttacacaataccataaatgatatggtatttgaggtgttaagagaccaagaaatctccatcaacattcaataccttaagaaaacgtgggtcgatatgtgtaaaagtttcttgcaagaggcaaaatggtactatagtggatacacaccaacattggaagaatatattgaaaatggttggatttcagtaggagcaccagttattcttgtgcatgcttatttttttcacgcaaataataatggcacaattacaaatactaaagagattttcgaatgcttggaatatggttattatcctgccattattcgtcacagtgccataatattacgatttacaaatgacctagcaacatcatcggaggaattgaaaagaggtgatgctccgacatcaattcaatgttacatgcaagaaaaaaatgtatctgaagaggaagctcgtgaacatattaagtttttaataaatgaagcatggaaggagatgaataatgatgttggattatatccaatctcattgactgaagatgctacaaactttgctaagatgggatttttcatatatcaacatggtgatggtcatagttctcaagataatcaatccaaacaaaaaatttcatccttgattattgaacctattcccctatataca

SEQ ID NO: 1370 - DNA, 1701 bp, synthetic construct
  misc_feature 1..1701: note = Description of Artificial Sequence: Synthetic polynucleotide
  source 1..1701: mol_type = other DNA
atgtcgtctcaaatcttagcaacctcatccaaaaatgacaatatacataaaattgttcggccaacaacaaattatcatccttctatttggggagaccgatttttgcattacgatattccaaaagaagaattgaattataaacaaggccaagttgaagaattgaaagaagtggtaagaaaggagatatttggagaattattatgtgatgattggaataatcgattgaagttaattgatgtggtagaacgtttgggattgtcctatcattttgagagtgaaatacaaaatgagcttcaacacatttacaacaaaataagcattaatgatactaatttcaaacatgaaactttgcatgatgcttctattcggtttagacttctacgacaacatggatatagggtttctttagatatatttgacaagttcaaagatgagaatggaaactttaaagaatgtttggcgagtgacaccgttggtttgcttagcttatatgaggcctcacatttgagctgtgttggagaaaatttactagatgaagccctttctttcactaccaaacacctaactgaatttttggaaaataataaaaaagaacaccccaatgatgatcctttatcaaaggaaatatctcgagccctagagaggcccttaagaaagaccctagtgaatctccatgcaaggtatttcatttcaatatatgaaaaagatgcctcacataacaaagtattgctacaacttgcaaagttagatttcaatctattacaatccatgcacaaaaaggagcttagtgaaatctccaggtggtggaaggaattagacagtgcacacaactttccatttgcaagaaataggattgtggaactatacatttggatattaggagtctattatgaaccccaatactcttttgcaagaaatattttagtgaagatcatagcactttcctcaatcgctgatgatatttatgattcatatggtatatttgaagaacataagctccttattgaagcaattgataggtgggacaaaaattgtatggataaactccatccagaatacttgcagaaatattataagatacttttgcaatcttttgaggaatttgaacaagagtttgaaaaggaggaaacttacaaagtttactatggaaaagaaacgtttaaaagattattaagaggttattttgaggaagctcgatggttgaatgaaggatacatgccaagtttggaggagcatttaaaagtttctttggttacttctggttatttcatgttgatggcttgctctttagttggaatgaaaagtaacaatattgtaaccaaacaagttttcgagtggctctccaaagaccccaagattgttagggcaagcgctagtgtttgcaggtacatggatgacgtggctggtcacaagaatgagcaagagagaaatcatataccatctacaatagaatgttacatgaagcaatatggtgtatcagaagaagaagcatgtgatgaaatgaataggcgagtggttattgcatggaaagaaataaacgaagagtttctcaaaccaactgaagcagcttcacctatattagttcgtgctctgaatcttgctagggttatggatcttctctacaaaaatggtgataactatacacaagttggaaaagtcactaaagatagtgttgctgtcttgctcattgatccaattcca

SEQ ID NO: 1371 - DNA, 1935 bp, synthetic construct
  misc_feature 1..1935: note = Description of Artificial Sequence: Synthetic polynucleotide
  source 1..1935: mol_type = other DNA
atggctgcattagtgtccactgtaagtagtattattaggtggaatagtaataataataataataataataccttcactagatctgtgaaatcatgtttaagttcaaattaccataataataataatattattcatagtaataaaactgtattgatgtccaccaataataataataataataataataagaatagttctcgaagatcagcaaactatcaacccccactttggcaatttgattatgtacaatcactttctactcctttcaaggatggagcatatgtcaaaagagttgagaaagtaaaggaagaagtaagagtgatggtgaagagagcaagagaggaggagaagcctttatctcaacttgagctaattgatgtattgcaaagacttggaatctcttatcactttgaggatgaaattaatgatatattgaaagttatatataacaacaataatgtgtacaacaccaacaaaaataatgtgtatgccaattctcttgaatttagactcctacgacaacatggttatccggtgtctcaagaaatttttagtacgtgcaaagatgaaagaggcaattttatggtgtgtaccaatgatatcaaaggaatgttatctttatatgaagcttcattctatttggtagaaaatgaagatggtattttggaagagacaagacacaaaacaaagaaatatcttgaggaatacataatcatgatcatggaaaaacaacaatcattattagatcaaaataataataatgattatgattatgataattatgattatgaactagtgagccatgcattggagcttccacttcattggagaatgttaagattggagagtaggtggtttattgatgtgtatgagaagagactagacatgaaccctactctacttaccttagctaaactagatttcaacattgtccaatcaatataccaagatgatcttaaacatgtcttcagctggtgggaaagcactgatatgggaaagaagttggaatttgcaagagatagaacaatggtgaatttcttatggacagtaggagttgcatttgagccacatttcaaaagttttagaagaatgattacaaaagtaaatgctttaattacagtaatagatgacatatatgatgtttatggtacactagatgaattggagctcttcactaatgcagttgagagatgggacattagtgctatggatgggctccctgagtatatgaagacatgttttcttgctttatacaatttcataaatgatcttccatttgatgtgttaaaaggagaagaaggcctccatataataaaattccttcagaaatcgtgggcagatctttgcaaatcttatttaagagaagcaagatggtattataatgaatacacaccaagatttgaagagtacattgagaatgcatggatatcaatatcaggacctgttatactatcacatttatacttttttgtagtgaatccaaacatggaagatgccttattaagtacttgctttgatggataccctaccataatacgacattcatcgatgattttacgacttacagatgatctgggaacttcaacggatgaattgaaaagaggcgatgttcctaaatcaatccaatgcaaaatgtatgaagatggtatatctgaagaggaagctcgtcaacgtattaagttattaataagtgaaacatggaagcttattaataaagattacataaatttggatgatgatgatgatggtggtgatgactactctccaatgttctataagtctaataatattaataaggctttcattgaaatgtgtttaaaccttggtagaatggcacattgcatttatcaatatggagatggacatggaattcaagatcgccaaacaaaagatcatgtactatcattacttattcaccctattcctcttacccaa

SEQ ID NO: 1372 - DNA, 2541 bp, synthetic construct
  misc_feature 1..2541: note = Description of Artificial Sequence: Synthetic polynucleotide
  source 1..2541: mol_type = other DNA
gaattccaatctttgccccaaactcaggctaagttgatcaacgagatcaaagaaacgatgttctcatcgttagacatcaatccttactccctcgtttctccttgtgcttacgacactgcatggctagccatgataccacatcctaaccaaccttcgaagcctatgttcgagggttgtttgagttgggtgcttaacaaccaaaccgaacatggcttctggggtaactgtgatgaccagagtggcatgccaaccctagagtgtctgactgccactctggcttgtgttgttgccctaagaaagtggaatgttggttcttccatgataagtaaagggttggaatttattcattcatctaatgcaaaaaggctcttaaaagaaatgaaaaaagaaggctttattcctcaatggtttgcaatcgttttcccgggaatggttgaattggctgaagaagttctcaaaatccaaatcttaaaggatcaatccgttttcgtttcggacatattttaccataggcaactcattttcaaaaagtacatatatttagagctacataataaggagacatatttgttatcatatcttgaagtgttgccatcatcatattttaatgaagaattaataataaaaaaattgtgtgaaaagggttctttgttccaatctccatcggcaacagcacaagctttcatggcaactgaaaattccaaatgcttgcattatttgcaaaccctagttcacaagttttccaataataacaacaataatatcattggagttcccactacatatcccatggacaaagatcttataaagctttgcattatcaactatgtcgaaagattagggttagctgagcatttcgctatcgaaatcgaacaacttctacaacaagtttataagaattatgtgaaatgcgatggagaattttattacgaaaaaagttactattcattggcaactttagagttacacctactcaaagaatcattagcttttaggcttctaaggatgcatggctacaaagtttttcctagtaacatctattggattttgaagaatgaggatataaaaaatcacatagaatcaaactatgaatgcttttcggttacgatgttgaatctttacagagctactgatcttgcttttcatggtgaatttgagcttgatgaactaagaatattttcgagaaaactacttcaaaagtctattttagtaggagctccacatacaaatccttttaacaaactgattgagaatgagttaagtcttccatggatggctcgactagatcacttggaacatagactttttattgaacaaactaatgaagctcaatcatctttatggatgggaaagacttctttccaaaggttgtcgaggtttcacaacgacaaactagttcgtctagccaccttaaattatgagttcaaacaatctatttacaagaccgaacttgaacaattaacaaggtggtgtaaatattggggacttaatgaaatgggatttggtagagaaaaaagtacatactgttattttgcagtagcttcagcttgttgttctttgccttatgattctccaattcgattgatggttgcaaagggtgctataataataacaattacagatgatttttttgatatgaaagaatctctaatcactgagttaaaaacttttactaaggcctttcaaaggtgggatggtaaagaattgagtggtgttagtaagaaaatatttgatgccctagataatctttggtatgaaacgatttgttcatggcttactgaatcggagtggagtaaaaatgggattgtaccaaccatggatgaatatcttaaagttggaatgacttccatagcaactcacaccttgcttcttccagcttcttgttttgtaataaatccaactttaccggtctactctcaattacgaccaattcaatgtgagagtgttacaaaactcgtcatgactatttgtcgtctgttaaatgacttacaaagttatgagaaggaaaaagaagaaggcaaaccaaactcaattactgtgtacatgaagaacaattctgaggtagaaatggaagaagcagtaaagtacgtgaaagagatattaaacaagaagaagaaagagttactcgaacatgttatgattgatggctttaccaatctttcaaaagagtgtaggcttctacacctctcttgcttaaaagtatttcaaatgttcttcaactcttcgaatcgatatgattcagacactgaaatgcttgacgacattagcaaagcaatctatgttcctttgaaatcaattgatcatgaaggactcgaaaagaatctcttaaggcctccaaagtcaccgatgattgatcttactcgagtcaaatcaacgaccatgaaatgttcgatgaacatgaataaatttagtcaaccctctaaatgtctaaccgctaaatattttgtcatgaatgagctttctcttcataaacacaacaaggttgagaacttgaaaataactacacctactatgccttcaaaactcaattttttctttatt

SEQ ID NO: 1373 - DNA, 1683 bp, synthetic construct
  misc_feature 1..1683: note = Description of Artificial Sequence: Synthetic polynucleotide
  source 1..1683: mol_type = other DNA
atgtctagtcaagtgttagcttcatctcaaaaaaatgacaaaacacaaaacatcattcgaccaacaacaaaatttcacccaccaatttggggagatcgattcctccattacaatatttcagaacaagagttggaatataaagagggacaagttgaagaattgaaagaagttgttaggaaagagatattccatggaaataataaaagaaatattattaatgtttcgaaacaattaaagttaattgatgatgtggaacgtttgggattatcttatcattttgaaagtgaaatagaaaaaaagctacaacacatttatgatcaacactactactactccaaccatgatgaagatctacatgatgtctctattcgatttagattactacgacaacatggatttaacatttcatctacagatatatttgagaaattcaaagatgagagtggtaagtttaaggaaagcttgaaaagtgacattgaaggtatgcttagcttgtatgaagcttcatacttgagctatgttgaagaaaatatactagatgaggctcttgctttcactaccaccaatcttaagttagtggccaacaaaaaagaacatccattatcacatgaaatatccttagccttatataggcctttgagaaaaaccctagtgaggctttatgctaggcattacatttcaatctatgagaaacaaccttctcataacaaagtattgctacaatttgcaaagttggacttcaatctactacaatctttgcataagaaggagcttagtgaaatttccaggtggtggaaagaattagacttggcaaacaaactaccatttgcaagaaataggattgtggagctatacctttggatactaggagtctttcatgaacctcaattctctcttgcaagaaaaatcttaattaaagccatttcaatggcctcagttgcagatgatatttatgatgcatatggtacatttgaagaacttgagctcctcaccgaagcaattctcaggtgggacataagttttatagataaacttagtccagattatttgaagacatattataaggtatttttgaattcttatgaagaatgtgaaaaagatcttaaaaaggaagagagatacaaacttcactatgcaaaagaatcgatgaaaaaattaatacaagcttatttccatgaagcacaatggttgaaccaaggacatttcccaagctttgatgagcatttgaaagtttcttttgtgtcttctggttacccaatgttgattgagacctcttttgttggaatgcaagatgttaaaacaaatcaagtatttgaatggctctctacacaaccaaagatttttagagcttgcactatcatttctagattcatggatgacctagtttctcgtaagttcgagcaagagaggaatcacgtaccatctacagtagattgctacatgaagcaatatggtgtatcggaacaagaggcatgtgatgagctcaataaacaagtggttaatctatggaaagaaataaaccaagagtttcttaggccaacttctatgccttcatctatcttagttagaattcttaatttcacaaaagtgcttgacattatctacaaagaaggtgatggctatacacatgttggaaaattggttaaggacagtgttgctgcgttgcttatagatcccatccca

SEQ ID NO: 1374 - DNA, 1329 bp, synthetic construct
  misc_feature 1..1329: note = Description of Artificial Sequence: Synthetic polynucleotide
  source 1..1329: mol_type = other DNA
tggttcttacataacgaagaaattaaaaatcacatcgagacaaactgcgaatacttttcgattatgttgttaaatctttacaaagccacagatcttgcttttcaagatgaatttgagcttaatgaagcaagaaatttttcaagaaaactacttgagaaatgtatttcaatggaagaaaatggagatcacatatttcataatctgattgagcatgaattaagtcttccatggatggcccgattggaccacctcgaacataggttttggatagaagaaactaaaaaccatgttctatggcttggaaagaatcattttcgaaggttgttaagcattcataatgacaaattaattcgtctagccatcttaaattaccacttcaaacaatctatcttcaaggctgaactcgaacacttaacaaggtggtgtaaagattggggacttagtgaaatgggatttggtagagaaaaaagtatgtattgttatttcgcaatagcttcaacttgtagttctttgccttatgattctccaattcgattggcggttgcaaaaggtgctataataataacggtgacagatgatttttttgatatgaaagactccttaatcaccgagttagaaaactttactaaggcaattcaaaggtgggatggtgaaggattgagtggtgttagtaagaaaatatttgatgccctagataattttgtaaaggaaatggcaattatgtaccttgatcaacaagaaacaagtgacatcacaaatttcttaagagaaatatggtatgaaacaattgtttcatggcttactgaatctaaatggagtaaaagtgggattataccaaccatggatgaatattttaaagttggaatgacttctatagcaactcacaccttgcttcttccagcttcatattttctaaagccaagcttaaaaatatcccaattacaatcaacggagtatgccatcgttactaaattggttatgattatttgtcgtttgttgaatgacatacaaagttatgagaaagaaaaaaatgagggcaaaccaaactcaattacagtgtacttgaagaacaatcccgaggtagagatcgaagaagcaatcgagtacgtgcaagagatactaaataaaaagaagaaagaattacttgagcatgttttgattgacaacgacgacgatgatgatgttagggttttgcacctctcttgcttaaaagtatttcaaatgttcttcaactcttcgaatcgatttgattcagaggttgaattgcttgatgatattggcaaagcgatctatattcctttgaagttagatggattagcatctaataaa

SEQ ID NO: 1375 - DNA, 1515 bp, synthetic construct
  misc_feature 1..1515: note = Description of Artificial Sequence: Synthetic polynucleotide
  source 1..1515: mol_type = other DNA
gatttagataaatacagggacgttttaagaaaagcagacccatttgatgaaggtctgaagatgattgatgctattcaacggctaggaattgactatatcttcgaggaagagattgataaaattatacaaagccagtctgcttataagttttttagagaattcgagcatgatcatcatcatcatcaagatctgtatgatgtagctcttcgttttcgactcttgagacaacacggtcacttcgttcctgctgatattttcaacaagtacaaggacaataataagggttgtttcgacacaaggctaagagaggacatcaagggtttgctgagcttatatgaagcctcccatctatgcatagagggagaaaatatccttgatgaagctgctttatttagtgctcaacacttggaagcgtccatgacacgtcttcatcgttatgatcaatatcaggccaaatatgtggcaactacacttcaaaatcccactcacaaaagtttatccaagttcacagccaaggacctttttggtgtctatcccagtcagaatgggtacataaatttgtttcaacaactagcaaaagttgaatttaatagagttcagtccctgcatagaatggaaattgataaagtcaccagatggtggcgagacattggtttagctaaggaattaactttcgcaagagatcaaccggtgaagtggtatatttggtccatggcctgcctaaccgatccaatcttgtcgaaacaaagggttgcgcttacaaaatccatttcgtttatctatgtaatagatgatattttcgacatgtacagttcacttgatgaactcattctcttcacccaggctgtctctagctgggaatatagtgctatagaaaaacttccagactccatgaagacatgctttaaagccctagataatatgatcaatgagtctagccatacgatctatcaaaagcgtggatggagccctttacactctcttcggaagacgtgggcaagtttgtgcgaagcctttttagtagaggcaaaatggtttgcatcaaggcacgtaccaaaggcaaaagaatacttggaaaatggtgtggtcagctcaggagtgcacgtagttctggttcatatatttgttctcttggatgaaaccagtctcacccaaaagacactggattttgtggaaaacatgccttccatcattacttctacagcatcgattcttaggctttgggatgactttggtagtgccaaggatgagaatcaagaaggacatgacggatcttatgtggagtgttacatgaaggaattaggaggcagtgttgaagatgcacgtgaggaaatgatggaaaagatttcagatgcatggaagtgcctcaacaaagaatgcatacttcgaaatccagcgtttccaccaccattcctcaaagcttctctcaatctcgcaagattagttcctttgatgtataattatgatcacaaccaacgcctaccccacttggaagaacatatcaaatctttgtta

SEQ ID NO: 1376 - DNA, 1683 bp, synthetic construct
  misc_feature 1..1683: note = Description of Artificial Sequence: Synthetic polynucleotide
  source 1..1683: mol_type = other DNA
atgttcacacaaatcttagtatcattatcttcaaatgacaacccaaatataattgttcgtcctacaaaaaaattccacccaaatatttggggagaacgattcttacattacaacatttcacaacaagatttgtattgtcaacaacaaaaggttgaggaattaaaagaagtggttagaagagaaatatttggagattattattatgatgcttggaaaaatcaattgaagataattgatgtggtagaacgtttgggattgtcttatcattttgaaactgaaatagaaaataagcttcaatgcatttacaacaaaaccaatattgatgatgaagatttacaccatgtttctattcgatttagacttctacggcaacatggatttagaatttcttctgcagatatatttgaaaaattcaaagatgaggatgggaactttaaaaaatgcttggtaagtgatacccttggtttgcttagcttatatgaagcctcacatttgagctgtgttggagaaaatatacttgatgaagcacttgctttcacaacaacacacctaaatgagtttttggcgaagaaaaaagaacaccatgaagacgatgatccattatcgaaagaaatatctcgagccctagagaggcccttaagaaagaccctagtaaatcttcatgcaaggcatttcatttcgatatatgaaaaagatgcctcacataacaaagtattgttacaacttgcaaaattagattttaatctattacaatgcatgcacaaaaaggagcttagtgaagtcagcaggtggtggaaagaatcagattttgtacacaaatttccatttgcaagagataggattgtggaattgtacctttggatattaggagtttattatgaaccccaatactgtttggcaagaaatattctagtcaaaatcatagctttggcctcaattgctgatgatatttatgatgcatatggtacacttgaagaacttgagttcctaactcatgcaattgaaaggtgggatataaattgtgtagataaactgaatcaggaatatatgcaaacattttataaagatgttttgaattgttatgaagagtttgagcaactgctagaaaaagaagaaacatacagagttcattatgcaaaagaagcgtttaagggattagttcaatctcatttgaatgaagctcgatgtttgcatagaggatacatcccaagttttgaagagtacttgaaatttgctttgggtaattgtggttactacatgttgatactaagctctttggttggaatgaaaactaatattgtaacaaaagaagtttttgagtggctctcgaaagatcgaaagattattagagcatctgttactatttgtaggctaatggatgacatagccgaacacaagtttgaggaagatgattatgaggaacattcagcagtggaatgctatatgattgaacatggcgtttgtgaagaggaagcctatgatgaactgaataagctaataatgaatgcatggaaagaaataaatgaagagtttttgaagcctactaaagtagcttcacctatattacttcgtgctcttaacttttcaagggttatggatcttattttcaaatttggagatggttatacacacgttggaaaaatcaccaaagatattgttgctgctttgcttattcatccaatt

SEQ ID NO: 1377 - DNA, 1320 bp, synthetic construct
  misc_feature 1..1320: note = Description of Artificial Sequence: Synthetic polynucleotide
  source 1..1320: mol_type = other DNA
tggttcctaaagaatgaggaaataaaaaactacatagaattcaactctgaatacttttttgttgcaatgctaaatctttacagagctactgatcttgcttttcatggtgaatttgagcttgatgaactaagaacattttcaagaaaattacttgagaaatctatttcagaaggagctcaacatacaaatccctttaagaaactgattgagcatgagttaagtcttccatggatggctcgactagatcacctcgaacataggttttttatcgaacaaactaataaagctttatggatgggaaagacatcttcacaaaggttatcaaagttttacaatgataaattaattcgtctagccactttaaactacgagttcaaacagtatatttacaagactgaacttgaacagttaacaaggtggtctaaagaatggggacttagtgaaatgggatttggtagagaaaaaagtacatacaattattttgcagtagcttgtgcttgctgttatttgccttatgattctccaattcgattgatgattacaaagggtgctataatagtaacggttgctgatgatttttttgatatgaaaggctctctattcactgatttaaaattcttcactaaggcaattcaaaggtggaataatgaagggttgagtggtgttagtaaaaagatatttgatgccctagataatcttgtaagggaaatgtcaactatgtaccttgaacaacaagaaaaaagtcatgaagacataaccagctacataagaaaaatttggtatgaaacgatttgttcatggcttactgaatctgagtggagtaaaagtggaattgtaccaaccatggaagaatattttaaagtttcaatgacttctgtagcaactcataccttgcttcttccagcttcatttcttctgaaaccgaccttaaaaaaatctcagttacaattaatggagtataaaagtgttactaaattggtcatgattatttgtcgtttgttgaatgacttacaaagttctgagagggaaagagaagaaggcaaaccaaactcaatcacagtttacatgaagaataattttgagatagagaataaggaagaagtagtaaagtacttgaaagagatattaaacgataagaagaaggagttccttgagcatgttttgattaatgacaatggttttaccaatcttcctaaagagtgtaggcttctacacttatcttgcttaaaagtattccaaatgttctttaactcttcaaatcgatatgattcagacactgaattgcttgaagacattaacaaagcgatttacattcctttg

SEQ ID NO: 1378 - DNA, 1590 bp, synthetic construct
  misc_feature 1..1590: note = Description of Artificial Sequence: Synthetic polynucleotide
  source 1..1590: mol_type = other DNA
aataacaaagagagttatgtgaagattattgagctgaaggaacaagtgaagaagaaattacttcatggtcttcatcctttggaaaatcctttagagacacttgaatatattgatgatattcaacgattggggttatcttattattttgaaaatgaaattgaacaagttttgaagcaatttcataataataataacaatcttcatcatgattttggtgataataacctttatgctgatgctcttcgatttcggttgcttagggaacaaggttataatattgcatgtgaggtatttgccaaatataagaatgagaaaggaaaatttaaggaatcaatttcgagtgacattcgaggaatgttgaacttgtatgaagcttcacaaatgagagttcgcagagaagaaatactagatgaagctcttatcttcacaactactcatcttcaatccttagtggaaacatcccaattgagctctccttatctagacctagtgaaacatgccctaatgcaccctatccgaaagagctttcaaagaagagaggcaagactttacatatcactttaccatcaactaccttctcacgaagagcttcttttaaccctcgccaaactagatttcaacttgcttcaacaactacatcaaaaggaattgaattatattacgaggtggtggaaggagtttgacttcaaaagtaagcaatctttttcaagagacagaatagtggagtgttacatttggaattatggagtatattttgaagctcaaacttcccaaattaggttgatgatgaccaagttgatttctttgcttactattattgatgattcttatgatagctatggtacacttgaagagctaaggccttttactgaagcatatatatatttacttaataaatatgatatgattatcaggtgggatatatctgctactgacaacttgccagagtacatgaaagtatgttacaaaaaatgtttagaatttttcaatgaaattgaagaatttacaaaggaaaattcatactgcgcgagttatattaagaaagggttgcaatgtatggttagagcttatagtaaggaagtccaatggttacacaataaatatatgccaacatttgatgaatattatccaattggacttgataatgctggatctgaagagctaatatcaatggccttttgtggaatgggagatgttgtaacaaaagaatctatggattggatattttctcaaccccaacctaagattatacgaactatgtcaattgttggaagacttatgaatgacattggctaccacaagtcggatcgaagaaaattatcaaaagatgtagtggcttctgctgtggagtgttacatcaaacaatatggtgtaacagatgaagaagctatagagaaacttaacgaacaagttaatgattcatggaaggatctcaatgaagatcttctctatccaatcgctattcctagaccactcttaatgagagttctcaatcttgtacgagtgaaccatgagatgtacagagaaggtgacggttttacacaaccaacattgctcaagaatttgattgatactctcatcatcaatccc

SEQ ID NO: 1379 - DNA, 1605 bp, synthetic construct
  misc_feature 1..1605: note = Description of Artificial Sequence: Synthetic polynucleotide
  source 1..1605: mol_type = other DNA
aatgttgttgttcgaccaacaacaaaatttcacccttctatttggggagatcgattcctccattacaatgtatcacaacaacacttggaatgcaaagaagaacgagtgaaggaattagttgaagttgtaaggaaagagataatgatatcattattatcatcattgaagttaattgatagtgttcaacgtttgggattatcacaccattttgagactcaaatagaacaaatgttggaaaaacatgatctaaactactacaaacatgatctacatcatgattctattatgtttagactattaagacaacatgggtttaaggtttcatcaagcatatttgagaaattcaaagacgagaaaggtaattttaagaaaagcttgataaccgatgtttcgggtttgcttagtttgtatgaggcttcctacttgagttatgttggagaaagcatactagatgaagcacttgctttcacaaccactcaccttaaggctattgtggcaaatagtaaagatcatccattatcacatcaaatatccaaagcattggaaaggccattaagaaagaccatagagaggcttcatgctaggttttatatctcaatctatgaaaaggatgcctctcataacaaagtattgctagaacttgcaaagttagatttcaatctacttcaatgtttccacaaaatggagcttagtgaaattatgaggtggtggaaaaagcatgactttgcaaacaaattcccttttgcaagagataggatggtggaactatatttttggatgttgggtatatattatgaacccaaatactctcgagcaagaaagctaacaaccaaaatctctgctttgatttcaatcacagatgatatatatgatgcatatggtacaattgatgagcttgagcttcttacccaagccatgcaaaggtgggacataaattttatagataaacttgagccagaatatttgaagacatattataaagcaatgttgacttcttatgaagaatttgaaaaagagtttacaaaggaagaattatacaaacatcaatatgcaaaagaagagatgaaaaaattgattcgagcttatttagaagaagctcgatggttgaacgatggatacttgccaagcttcgatgagcatttgagagtttcttatgtttcttgtgcttacacaacgttaatcgccacaagttatgtaggaatgtatgatattgtaacacatgaaactctaaattggctctccaaagaccctaaaattgtttcagcttccactctacttgctaggttcatggatgatattggttctcgcaagtttgagcaagagagaaatcacataccatctacagtggaatgttacatgaagcaatatggggtatcagaaaaagaggcaattgaagaactgaataaaagagtggtcaattattggaaagaaattaatgaagacttcattaggccaactgttatgcctttccctatcttagttcgtgttcttaatgttacaaaagtattggatcttctttacaaaaatggtgatgatcaatatacacatgttggaaaattgtttaaagaaagcattgctgctttacttatagatccaatccctgta

SEQ ID NO: 1380 - DNA, 1917 bp, synthetic construct
  misc_feature 1..1917: note = Description of Artificial Sequence: Synthetic polynucleotide
  source 1..1917: mol_type = other DNA
atggctgcattagtgtccactgtaagtagtattattaggtggaatagtaataataataataataataacttcactagatctgtgaaatcatgtttaagttcaaattaccataataataataatattattcataataaaactgtattaatgtccaccaataataataataataataatcagaagaatagttctcgaagatcagcaaactatcaacccccactttggcaatttgattatgtacaatcactttcttctcctttcaaggaaggagcatatgccaaaagagttgagaaagtaaaggaagaggtaagagtaatggtgaagagagcaaaagaggaggagaagcctttatctcaacttgagctaattgatgtaatgcaaagacttggaatctcttaccactttgagaatgaaattaatgacatattgaaagatatatataacaacaataatgtgtgcaacaccaacaataatgtgtatgccaattctcttgaatttagactcctaagacaacatggttatccggtgtctcaagaaatatttagtacgtgcaaagatgaaagaggcaattttatggtgtcttccaatgatatcaaaggaatgttatctttatatgaagcttcattctatttggtagaaaatgaagatggtattttggaagagacaagacacacaacaaagaaatatcttgaggaatacataatcatgatcatggaaaaacaacaatcattattagatcaaaataataataataatgataatgattatgattatgaactagtgagccatgcattggagcttccacttcattggagaatgttaagattggagagtaggtggtttattgatgtgtatgagaagagactagacatgaaccctactctacttatgttagctaaactagatttcaacattgtccaatcaatataccaagatgatcttaaacatgtcttcagctggtgggaaagcactggtatgggaaagaagttggaatttgcaagagatagaacaatggtgaatttcttatggacagtaggagttgcatttgagccacatttcaaaagttttagaagaatgattacaaaagtaaatgctttaattacagtaatagatgacatatatgatgtttatggtacactagatgaattggagctcttcactaatgcagttgagagatgggatattagtgctatggatgggctccctgagtatatgaagacatgtttctttgctttatacaatttcataaatgatcttccatttgatgtgttaaaaggggaagaaggcctccatataataaaagtccttcagaaatcgtgggcagatctttgcaaatcttatttaagagaagcaagatggtattatgatggatacacaccaagatttgaagagtacattgagaatgcatggatatcaatatcaggacatgttatactatcacatttatacttttttgtagtgaatccaaacaaggaagatgccttattaagtacttgctttgatggataccctaccataatacgacattcatcgatgattttacgtcttacagatgatcttgcaacttcaacggatgaactgaaaagaggcgatgtttctaaatcagtccaatgcaaaatgcatgaagatggcgtgtctgaagaagaagctcgtcaacatattaagttattaataagtgaaacatggaaacttattaataaagattacataaatttggatgatgatcatgatggtgatgactactctccaatgttctataagtctaataatactaataaggctttcattgaaatgtgtttaaaccttggtagaatggcacattgcatttatcaatatggagatggacatggaattcaagatcgccaaacaaaagatcatgtactatcattacttatttaccctattcctcttacccaa

SEQ ID NO: 1381 - DNA, 2361 bp, synthetic construct
  misc_feature 1..2361: note = Description of Artificial Sequence: Synthetic polynucleotide
  source 1..2361: mol_type = other DNA
atgtctcattcattgcattccaacattaggtgctcctcctcttcttcctcatcagcttctcccataccaagactaaatggtgcaaggaaaagcaacatagctgttttgaagtttgaggagaccaaagagagaataaagaagatgttcaataatgttgaactctctgtctcgtcttatgacactgcctgggtggcaatgatcccttcaaattctgggcatcaccctttctttcctcaatgtgtaaattggttactagagaatcagcactctgacggttcatggggtcttcctcatcgtcatcccttgcttatgaaagatgctcttttatctactttaactagtgtacttgcaatgaagcgatggggtgttggcgaagaacaaatagacaagggcttgtctttcatagaggaaaatatagcttcagccattgatgagaagcaatgttcacctattggatttgaagtaatatttcctacaatgattgattatgcgaaaaaatcagatctgaatattactcttgagccatccaattataatgacctaattcataacagaaaggtttcacttgaaagagcctcaggaagctactcagagggtcatgaagcatacttagtgtacatttcagaaggtcttggaaagccactggattgtgaaagagtcttcaagtaccaaaggaaaaatggttctctgtttaattctccatccaccacagctgttgcttttacaaaccatgggaatgctgactgtcttaagtatctctgctctgttgtagacaagtttggaagtgcagttccaacagtatatcctctagatatttatgctcgtctctcaatggtggacaatctccaaaggttggggatagaacgatttttcaaagaggaaatcagaagtgtactggatgaaacatacaaatattggctgcaaggagaggagtgtgttctcttagatgcttccacctgtgcaatggcatttcgtttattgcgtgttaatggatatgatgtatcttcagatccattaattcgattttcagaagattatatatacaattaccttgggaatcataccaaggatatagatgctatcttggaaatatttagagcatccgagatcatcatacacccaaatgaatcaatcttggagaagcaaaatttctgtacaagtcattttctagaacaagagttatacagcatttcaactaggggagataaactcaataaaaatattggcaaagtggtaagtgaagctcttaagattcctttctatgcaaacttggaacgactagcaagtagaagagccatagagtactatgacactgatagtacgaggattctgaaaacttcatattgttcctcaaatgttcggagcaaggatttcctaatattagcagttgaagacttcaacatgtgccaatcaatacaccgtgaagaactcaaaattctttctaggtgggttgtagagaataggttggacaagctaaagtttgctaggcagaagctggcatactgttacttttctgctgctgctactctttcttctcctgaattatctgatgcccgcatatcatgggcgaaaaatggggtacttactacagtggttgatgatttttttgatattggaggttcagaagaggaactagtaaacctcattcaattgttggaaaagtgggatgtagatgtcagtgttgattgtttgtcggagcaagttgaaattatttatttagcacttcatggcacaatctctgaaattggagaaaaggcgttcgtgtggcaaggacgtagtgtgacaaatcacataatagagatttggctggatttgctcaagtctatgttgaaggaagctcaatggttgaaatacgagaccgtcccaacaatagatgagtatatgaaaaatggatacatatcatttgccttaggacctatagtccttccagcactttacttagttggacctatgctttctgaggatgttacaagacatcctgagctccattatctatataaactcatgagcacttccggacgacttctcaacgatatccacggcttcaagagagaatccaaagaagggaaactgaatatagtgtcactaagcctactggcgcgtggttttggctctggttcttcttctgaagaagagatcattaatgaaatgaaaagtgctgtaaatggtaagaggagagaattgctgaggctagtttttaaggaaaaagatagcattgttccaagagcttgcaaggacttgttctggaaaatgagccaagtgttgcacctattttatgccaatgacgacggattcacctcaaatgagatgatcaatgtcgcaaaagcaataattgaggagcccataattgaaaataaattg

SEQ ID NO: 1382 - DNA, 1701 bp, synthetic construct
  misc_feature 1..1701: note = Description of Artificial Sequence: Synthetic polynucleotide
  source 1..1701: mol_type = other DNA
atgtcgtctcaaatcttagcaacctcatccaaaaatgacaatatacataaaattgttcggccaacaacaaattatcatccttctatttggggagaccgatttttgcattacgatattccaaaagaagaattggtgtataaacaaggcgaagttgaagaattgaaagaagtggtaagaaaggagatatttggagaattcttatgtgatgattggagtaatcgattgaagttaattgatgtggtgcaacgtttgggattgtcctatcattttgagagtgaaatacaaaatgagcttcaacacatttacaacaaaataagcattaatgattctaatttcgaacatgaaactttgcatgatgcttctattcggtttagacttctacgacaacatggatatagggtttctttagatatatttgacaagttcaaagatgagaatggcaactttaaagaatgtttggcgagtgacaccgttggtttgcttagcttatatgaggcctcacatttgagctgtgttggagaaaatttactagatgaagccctttctttcactaccaaacacctaactgaatttttggaaaataataaaaaagaacaccccaatgatgatccattatcaaaggaaatatctcgagccctagagaggcccttaagaaagaccctagtgaatctccatgcaaggtatttcatttcaatatatgaaaaagatgcctcacataacaaagtattgctacaacttgcaaagttagatttcaatctattacaatccatgcacaaaaaggagcttagtgaaatctcaaggtggtggaaggaattagacagtgcacacaactttccatttgcaagaaataggattgtggaactatatatttggatattaggagtctattatgaaccccaatactcttttgcaagaaatattttagtgaagatcatagcactttcctcaatcgctgatgatatttatgattcatatggtatatttgaagaacataagctccttattgaagcaattgataggtgggacaaaaattgtatggataaactccatccagaatacttgcagaaatattataagatacttttgcaatcttttgaggaatttgaacaagagtttgaaaaggaggaaacttacaaagtttactatggaaaagaaacgtttaaaagattattaagaggttattttgaggaagctcgatggttgaatgaaggatacatgccaagtttggaggagcatttaaaagtttctttggttacttctggttatttcatgttgatggcttgctctttagttggaatgaaaagtaacaatattgtaaccaaacaagttttcgagtggctctccaaagaccccaagattgttagggcaagcgctagtgtttgtaggtacatggatgacgtggctggtcacaagaatgagcaagagagaaatcatataccatctacaatagaatgttacatgaagcaatatggtgtatcagaagaagaagcatgtgatgaaatgaataggcgagtggttattgcatggaaagaaataaacgaagagtttctcaaaccaactgaagcagcttcacctatattagttcgtgctctgaatcttgctagggttatggatcttctctacaaaaatggtgataactatacacaagttggaaaagtcactaaagatagtgttgctgtcttgctcattgatccaattcca

SEQ ID NO: 1383 - DNA, 1587 bp, synthetic construct
  misc_feature 1..1587: note = Description of Artificial Sequence: Synthetic polynucleotide
  source 1..1587: mol_type = other DNA
aataacaaagagagttatgagaagattattgagatgaaggaacaagtgaagaataaattacttcatggtcttcatcctttggaaaaccctttggagacacttgaatatattgatgatattcaacgattggggttgtcttattattttgaaaatgaaattgaacaaaatttggagcaatttcataataattatcaaaatctaattgattttggtgataataacctttatgctgatgctctttgctttcggttgcttaggcaacaaggttataatattgcatgtgacatattcgacaagtacaagaatgaaaaaggaaaatttaaagaatcaatttcgagtgacattcgaggaatgttgaacttgtatgaagctgcacaaatgagagttcatggagagaaaatactagacgaagcacttatctttacaactactcatcttgaatcctcagttaaaacatgtcaattgagctctccttatctagacctagtgaaacatgccctaatgcaccctattcgaaagagcttacaaagaagagaggcaagactttacatatcactttatcatcaactaccttctcatgaggagattcttttaacacttgctaaattagatttcaacttgcttcaaaaactacatcaaaaggaactaagttacataacgaggtggtggaaggagtttgattacaaaagtaagcattcatttataaaagacagaatagtggagtgctatttctgggtttatggagtgttttttgaggcagaaacttcccaaatcagactaataatcaccaaattaattgctattctcacaataattgatgatgcttatgatagctttggtacacttgaagaactagagccttttactcaagcaatagaaaggtatactttataatatatatatatgattaggtgggatatatgtgccatggatactctgcctgagtacatgaaaatattttacatgaaacttttggagatctacaatgaaattgaacaattttctaaggaaagatcatactgccctagctatgctaagaaaggggtgcaatctctaattagagcttattttaaggaagccaaatggttacacacaaaatatataccaacattagatgaatatatgccagttggggttgatagtgcaggatcttttatgctcatttcaatggtttttattggaatgggagatattgttacaaaacattctatggattggatattttctaatcctcaacctaaaattatacaaactatggcaatagttggaagagttatgaatgacattggctaccataagtcggagcggaagaaatcatcaggagaaattgtggcttcaactgtggagtgttacatgaaacaatatggcgtgactggtgaagaagctatagagaaacttagcgaacaagttaaagattcatggaaagatctcaatgaagatcttctcaatccaatcactatccctaggccactcttaatgcaagttctaaagcttgtacgagtgaaccatgagatttatagagaaggagatggctttacacaacccactttgctcaagaatttgattcattctctcatcatcaatcca

SEQ ID NO: 1384 - DNA, 1695 bp, synthetic construct
  misc_feature 1..1695: note = Description of Artificial Sequence: Synthetic polynucleotide
  source 1..1695: mol_type = other DNA
atgtccactcaaatcttagcatcatcatcatcttcaaatgaaaacccaaataaaattgttcgtcctacaaaaacatttcatccacatatttggggagaacaattcttacattacaacatttcagaacaagatttgtattgtcaacaagaaaaggttgaggaattaaaagaagtggttagaagagaaatatttggagaatcatcaatatcatcatcagcttattatgatggttggaaaaatcaattgaagataattgatgtggtagaacgtttggcattgtcttatcattttgaaactgaaataggaaatatgatagaacaaatctacaacaaaaccaatattaatgatgaagatttacatcatgtttctgatcggtttagacttctacgacaacatggatttagaatttcttcggatatatttgaaaaattcaaagacgaggatggcaactttaaaaaatgtttggcaagtgatacccttggtttgcttagcttatatgaggcctcacatttgagttgtgttggagaaaatatacttgatgaagcacttgctttcacaacaacacacctaactgagtttttagcaaagaaaaaagaacaccatgatgacgatgatccattatcgaaagaaatatctcgagccctagagaggcccttaagaaagaccctgaatcttcatgcaaggcatttcatttcgatatatgaaaaagatgattcacataacaaagtattgttacaacttgcaaaattagatttcaatctattacaatgcatgcacaaaaaggagcttagtgaagtcagcaggtggtggaaagaatcagattttgtacacaaatttccatttgcaagagataggattgtggaattgtacctttggatattaggagtttattatgaaccccaatactgtttggcaagaaatattttaatcaaaatcatagctttggcctcaattactgattatgatgcatatggtacacttgaagaacttgagctcctaactcatgcaattgaaaggtgggatataaactgtgtggatacactcaatcaagaatacatgcaaacattttataaggacgttttgaattgttatgaagagtttgagcaagtgctagaaaaagaagtaacataaagagttcattatgcaaaagaagcgattaagggattagtccgatctcatttggatgaagctcgatgtttgcatagaggactcatcccatgttttgaagagtacttgaaatttgctttggataattgtgcttactacatgttgatactaagctctttggttggaatgaaaactaatattgtaacaaaagatgtttttgagtggctctccaaagatcgaaagattattagagcatctgttactatttgtaggctcatggatgacatagctgaacacaagtttgaggaagatgattatgaggaacattcagcagttgaatgctatatgattgaacatggtgtttgtgaagaagaagcctatgatgaactgaataagctaataattaatgcatggaaagaaataaatgaagagtttgtgaagccaactcaagtagcttcacctatattatttcgtgctcttaatttttctagggttatggatcttattttcaaatttggagatggttatacacacgttggaaaaatcactaaagatattgttgctgctttgcttattcatccaattcca

SEQ ID NO: 1385 - DNA, 1461 bp, synthetic construct
  misc_feature 1..1461: note = Description of Artificial Sequence: Synthetic polynucleotide
  source 1..1461: mol_type = other DNA
caagagttgaagcaagttacgagtacttcacttagaaccacaaaagacccttgtattctcttgaagcttattgattctatccaaaggttgggactcgaatatcacttcgaaaatgagattgaagaagctgtttctttcatttacgcacataatgatcaaactactagtaatgatctcttcatgacagcacttagatttcgtattcttaggcaacatggcttatttgttggctcagatgtgtttgacagatttagaggcagagatgggaaattcttggacagcttaagcagtaacaagcatggaattttgagtttgtatgaagcttcacaccttggaatggctgaagaaaatgttttggaggaagccaagagtttcaccaccaaaaggctaagatatttctcagctgggaaaatggataatactttgtttggtaagcaagtgaaacaatcactggaagttccactgtattggaggatgccaagatctgaagctaggaatttcattgatctctaccaaatggatgagacaaagagtgtgactttgcttgagttggctaagttggattataatctggtccaatctgtgcatcaaaatgagcttaaggagttgggaaggtggtgggaaaatttgggattcaagaaaaatctaccttttgcaagagatcgtgtggtggagaactatttgtgggccatgggaatcgtatctgagccacagttctccaaatgcaggataggcttaaccaagttcgtttgcatattaacagcaatagatgatgtttatgacatatatggatcattagatgagcttgaacttttcacaaatgcagtagaaagctgggacataagggcaataagggatgaatttcctctttatttgaaaacatgctatcttggcatgcttaattttggtaatgaagtgatcgatgatgttcttcaaaaccatggcttgaatatttcctcctacattaaagaagagtggttaaatctctgcaaatcatatcttgtagaagcaaggtggttttataatgattatacaccaagtttgaatgaatacttggaaaattcatctacttcagttggtggtcatgcagctatagttcatgcttgtattttactcttagatggctccatacccgaaaccttactggattacaatttcaaccattttcactctaagctgatttattggtcatctcttataacaaggcttagtgatgatttaggaacttcaaaggatgagcttaaaagaggagatgtgaagaaatcagtggagtgctacatggcagagaaaggaatatgggaagaagaagaagcaataaatcacataaaagaattgagaagaaattcatggaaaatggtgaacaaggagataataattgggaataattgcctgccaaaaataatggtgaagatgtgcttgaacatggcaagaactgctcaattcatattccaacatggtgat

SEQ ID NO: 1386 - DNA, 1692 bp, synthetic construct
  misc_feature 1..1692: note = Description of Artificial Sequence: Synthetic polynucleotide
  source 1..1692: mol_type = other DNA
agtactccaatattcaaagatcaaccagcagcaatcgtccgccgatcaggaaactacaaacccacattgtgggatgctcattttttccaatcactccaagtcatatatacggaggaaagctatgggaaaagaatcaatgagctgaaagaagatgtgagaagacttcttgagaaggagagtgaaaatcctttagttaagcttgaacacatcaatgatttgagcagacttggaatatcttatcactttgaagatcaaattaagacaatattaaacctgacatttaacaataataatgcattgtggaagaaagataatttgtatgccactgctcttcatttcaaactccttcgacaatatggatttagtcatgtatcttcagagattttcaatgccttcaaaaacgagcaaaaggagttcaaagagagtttgagtaaggatgtgaaaggaatggtatgtctatatgaggcttcattctattcatttagaggtgaacccatattagatgaagcaagagacttcacaaccaaacatctcaaacaatacttgatgacaaggcaaagtcaatttactagagttgaccatcatgatgatgatgatcatgatcttgtgaaattggtaaagcatgccttggatcttccactccattggagattgccaagattggaggctaggtggtttattgatatgtatgctgaaaggaattatgatatgaatccaacttttcttgactttgctaaacttgactataacttcgttcagtcagcatatcaaaaagagctcaaatatatttcaaggtggtggagtggttctagattgacagaaaggctaccatttgctgacagagtagtggaaattttctattctgcagtggcattgaaatatgaggcggaatttggatttgttagaactgtgatgacaaaaattggtctcttgctaacactcatggacgatatatatgatgtgtatggtacactagatgagcttcagctttttctagaggcaattgagaggtggaatataaatgaactggatcagctacccgattacatgaagatattgtttgttgctttttataacaatgtgaatgagatatcttattatgtcctcaaagaaaatgggattcacaccatcaaatatctgaagaaggcgttgggggatctgtgtaaatgctatatggaggaggcaaaatggtttcacagtggacacataccaagtttagaagaattcattgagaatggatggaattcaattacaatacctctttgtcttatttatcattattgcttaattacaacttcaattacagaacaagacatggaacacttgcttcaatatccaaccattttacgtgtctcaggaactgtttttcgatttatagatgatttgggaacctcatcagatgaacttgaaagaggagataatccttcatcaattcaatgctacatgcgtgaaaagggtgttagtgaaaatgaaagccgtgaacacatatggaatttaattagtgaaggatggaaggaaattaatgaagttaaagcttcaaactctccatactctcaagtgtttattgaatctaccattgattttgttagaggagcaatggagatgtatcacaagggtgatggttttggtactaatcaagaccgatatcttaagaacaaagttgtcaacatgttcttcgatccaattccaatt

SEQ ID NO: 1387 - DNA, 1584 bp, synthetic construct
  misc_feature 1..1584: note = Description of Artificial Sequence: Synthetic polynucleotide
  source 1..1584: mol_type = other DNA
aataacaaagagagttatgtgaagattattgagctgaaggaacaagtgaagaataaattacttcatggtcttcatcctttggaaaaccctttagagacacttgaatatattgatgatattcaacgattggggttatcttattatttcgaaaatgaaattgaacaagttttgaagcaatttcataataataacaatcttcatcacgattttggtgataacctttatgctgatgctcttcgctttcggttgcttagggaacaaggttataatagtgcatgtgaggtattcgccaaatataagaatgagaaaggaaaatttaaggaatcaattttgagtgacattcgaggaatgttgaacttgtatgaagcttcacaaatgagagtatgcggagaaaaaatactagatgaagcacttatcttcacaactactcatcttcagtccttagtggaaacatcccaattgagctctccttatttagacctagtgaaacatgccctaatgcaccctattcgaaagagcctacaaagaagagaggcaagactttacatatcacgttaccaccaactaccttctcacgaaaagcttcttttaactgccaaactagatttcaacttgcttcaacaactacatcaaaaggaattgaattatattacgaggtggtggaaggagtttgacttcaaaagtaagcaatctttttcaagagacagaatagtggagtgttacatttggaattatggagtatattttgaagctcaaacttcccaaattaggttgatgatgaccaagttgatttctttgcttactattattgatgattcttatgatagctatggtacacttgaagagctaaggccttttactgaagcatggatcatatatatataattatacttttattttgtcatatcattaatttttttttccacacatataataaaatatttaatatttattaaaaaaattcttttaattttatttttttaatttaaaaaagcaactaaatagttactttttcaaaactcccaaaaagcgaaaatttctagaaacgagatttttctagtttttttccattttcagtaattgttttgaatttcggagtgtatgctgacgtgacacaacgatatttgtataaataattttcttaaaagtatttttataaataaaatcacttttaagtataatattaaaaaaaaaaccctaatatatattgagtattgctataagaaatattatagtgtcatatattgaaaacatgtcatatattattattatagtgcaaataaattgcaagttcatccccataatcaaaaattatcaaaagatgtagtggcttctgctgtggagtgttacatcaaacaatatggtgtaacagatgaagaagctatagagaaacttaacgaacaagttaatgattcatggaaggatctcaatgaagatcttctctatccaatcgctattcctagaccactcttaatgagagttctcaatcttgtacgagtgaaccatgagatgtacagagaaggtgacggttttacacaaccaacattgctcaagaatttgattgatactctcatcatcaatccc

SEQ ID NO: 1388 - DNA, 1905 bp, synthetic construct
  misc_feature 1..1905: note = Description of Artificial Sequence: Synthetic polynucleotide
  source 1..1905: mol_type = other DNA
tctataatggctgcaatattaagtagtattattagcttgaatagtaataataataataataccttcactagatgtgtgaaatcatgtttaagttcaaaccataataattataatattattcataataaaactgtaataatgtccaccaataataataataatattaataatattatttctcgaagatcagcaaactatcaaccttcactttggcattttgattatgtacaatcactttctacccctttcaaggaaggagcatatgccaaaagagttgagaaagtaaaagaagaggtaagagtaatggtgaagagagcaaaagaggaggagaagcctttatctcaacttgagctaattgatgtaatgcaaagacttggaatctcttaccactttgagaatgaaattaatgacatattgaaagatatatataacaacaataatgtgtgcaacaccaacaaaaatgtctatgccaattctcttgaatttagactcctaagacaacatggttatccagtgtctcaagaaatttttagtacgtgcaaagatgaaagaggcaattttatggtgtcttccaatgatatcaaaggaatgttatctttatatgaagcttcattctatttggtagaaaatgaagatggcattttggaagagacaagacacacaacaaagaaatatcttgaggaatacataatcatgatcatggaaaaacaacaatcattattagatcaaaataataataattatgattatgataattttgattatgaactagtgagccatgcattggagcttccacttcattggagaatgttaagattggagagtaggtggtttattgatgtgtatgagaagagactagacatgaaccctactctacttaccttagctaaactagatttcaacattgtccaatcaatataccaagatgatcttaaacatgtcttcagctggtgggaaagcactgatatgggaaagaagttggaatttgcaagagatagaacaatggtgaatttcttatggactgtaggagttgcatttgagccacatttcaaaagttttagaagaatgattacaaaagtaaatgctttaattacagtaatagatgacatatatgatgtttatggtacactagatgaattggagctcttcactaatgcagttgagagatgggatattagtgctatggatgggctccctgagtatatgaagacatgttttcttgctttatacaatttcataaatgatcttccatttgatgtgttaaaaggagaagaaggcctccatataataaaattccttcagaaatcgtgggcagatctttgcaaatcttatttaagagaagcaagatggtattataatggatacacaccaagctttgaagagtacattgagaatgcatggatatcaatatcaggacctgttatactatcacatttatacttttttgtagtgaatccaatcaaggaagataccttattaagtacttgctttgatggataccctaccataatacgacattcatcgatgattttacgacttacagatgatctgggaacttcaacggatgaattgaaaagaggcgatgttcccaaatcaatccaatgcaaaatgtatgaagacggtatatctgaagaggaagctcgtcaacgtattaagttattaataagtgaaacatggaagcttattaataaagattacataaatttggatgatgatgatggtgatgactactctccaatgttctataagtctaataatattaataaggctttcattgaaatgtgtttaaaccttggtagaatggcacattgcatttatcaatatggagatggacatggaattcaagatcgccatacaaaagatcatgtactatcattacttattcaccctattcctcttacccaa

SEQ ID NO: 1389 - DNA, 1656 bp, synthetic construct
  misc_feature 1..1656: note = Description of Artificial Sequence: Synthetic polynucleotide
  source 1..1656: mol_type = other DNA
atgtcaaatattcaagtcttagcttcatttcaattaagtgacaaaattattgctcgtccaacaacaaattttcacccttctatttggggcgatcgattcctccattacaatgtttcagaacaagacttggtttgcaaacaagaaagaattgaagaattaatacaagttgtgaagaaagagatattatcttcaaatcatgatcaattgaagttgattgacaatctccaacgtttgggattatcacatcattttgagagtgaaattgagaaattgttggaacaattaagtatcggcactcatcatcaaaatcatcaagatctacatgatgcttctctttggtttagattattaagacaacatggatttaatgtttcatcaagtatatttgaaaaatttaaagacgatgaaggtaactttaagaaaagcttgataaccgatgtttcgggtttacttagcttgtatgaggcttcacacttgagttatgttggagaaagcatactagatgaagcacttgctttcacaaccactcacctcaaggctattgtggcaaatagtaaagatcatctattatcacatcaaatatccatagccttggaaaggcctctaagaaagaccatagagaggcttcatgctaggttttacatctcaatctatgaaaaggatgcctctcataacaaactattgctagagcttgcaaagttagacttcaatctacttcaatgtttccacaaaaaggaacttagtgaaattacgaggtggtggaaggagcatgagtttgcaaagaaattcccttttgcaagagataggattgtggaactgtatttttggatattgggtgtatattatgaacccaaatactctcgagcaagaaaacttctaaccaaagtcattgcattagcctcaatcacagatgatatttatgatgcatatggtactattgatgagcttcaacttcttaccaaagcaattcaaaggtgggacataaattgtctggataaacttgagccagaatatttaaagacatattataaggtaatgttggattcttatgaagaatttgaaaaggagcttaaaaaagaagaattatacaaacttgagtatgcaaaagaagagatgaaaagaattattggagcttattttgaagaagctcgatggttgagtgaaggatatttcccaagcttggatgagcatttgagagtttcatatgtttcttgtggttacgttttgttgatagccacaagttatgtaggaatgtatgatattgtaacacatgaaactctaaattggctctccaaagaccctaaaattgtttcagcttccactctacttgctaggttcatggatgatattggttctcgcaagtttgagcaaaagagaaatcacataccatctacagtagattgttacatgaaacaatatggggtatcagagaaagaggcaattaaagaacttaataaaagagtggacacccactggaaagaaattaatgaagactttattaggccaactgttgtgccttttcctatcttagttcgtgttcttaattttacaaaaatagttgatcttctttacaaagagggcgatgatcaatacacaaatgttggaaaagtgctcaaagaaagcattgctgctttgcttatagattcaatcccatta

SEQ ID NO: 1390 - DNA, 1698 bp, synthetic construct
  misc_feature 1..1698: note = Description of Artificial Sequence: Synthetic polynucleotide
  source 1..1698: mol_type = other DNA
atgtccactcaaatcttagcatcatcatcttcaaatgacaacccaaataaaattgttcgtcctacaaaaacatttcatccacatatttggggagaacgattcttacattacaacatttcacaacaagatttgtattgtcaacaacaaaaggttgaggaattaaaggaagtggttagaagagaaatatttggagaatcatcaatatcatcatcagcttattatgatgcttggaaaaatcaattgaagataattgatgtggtagaacgtttgggattgtcttatcattttgaaactgaaatagaaaataagcttcaatgcatttacaacaaaaccaatattgatgatgaagatttacaccatgtttctttacggtttagacttctacgacaacatggatttagaatttcttcggatatatttgaaaaattcaaagacgaggatgggaactttaaaaaatgcttggtaagtgatacccttggtttgcttagcttatatgaggctacacatttgagttgtgttggagaaaatatacttgatgaagcacttgctttcacaacaacacacttaaccgagtttttggcaaagaaaaaagaataccatgatgacgatgatccattatcaaaagaaatatctcgagccctagagaggcccttaagaaagaccctagtgaatcttcatgcaaggcatttcatttcgatatatgaaaaagatgattcacataacaaagtattgttacaacttgcaaaattagatttcaatctattacaatgcatgcacaaaaaggagctttgtgaagtcagcaggtggtggaaagaatcagattttgtacacaaatttccatttgcaagagataggattgtggaattgtacctttggatattaggagtttattatgaaccacaatactgtttggcaagaaatattttactcaaaatcatagctttggcctcaattgctgatgatatttatgatgcatatggtacatttgaagaacttgagatcctaactcatgcaattgaaaggtgggatataaattgtgtggataaactgaatcaagaatatatgcaaacattttataaggatgttttgaattgttatgaagagtttgagcaagtgctagaaaaagaagaacaatacaaagttcattatgcaaaagaagcgtttaagggattagtccgatctcatttggatgaagctcgatgtttgcatagaggactcatcccaagttttgaagagtacttgaaatttgctttggataattgtggttactacatgttgatactaagctctttggttggaatgaaaactaatattgtaacaaaagaagtttttgagtggctctcgaaagatcgaaagattattagagcatctgttactatttgtaggctcatggatgacatagctgaacacaagtttgaggaagatgattatgaggaacattcagcagtggaatgctatatgattgaacatggcgtttgtgaagaggaagcctatgatgaactgaataagctaataatgaatgcatggaaagaaataaatgaagagtttttgaagcctactaaagtagcttcacctatattacttcgtgctcttaacttttcaagggttatggatcttattttcaaatttggagatggttatacacacgttggaaaaatcaccaaagatattgttgctgctttgcttattcatccaatt

SEQ ID NO: 1391 - DNA, 1890 bp, synthetic construct
  misc_feature 1..1890: note = Description of Artificial Sequence: Synthetic polynucleotide
  source 1..1890: mol_type = other DNA
atggctgttcaccaattttctccatcaatagtatcatcactacctaccattagtacttataataataatcacttttgtagatttttcacaccaaaaacatctattagtcctatttcaaaaacaaaatcaaaatcaagcacttgctatcccatccaatgtactgtggtcaataatagtagccctagttctactattgttcgaagatcggccaattatgaacctccgatttggtctttcgattacattcaatctctttcaacccaatataagggagaatcctacactaggcaattaaataagttgaagaaagaagtgacaagaatgctccttggactggaaattaactctttagccctactcgagctaattgatacattgcaaaggcttggaatatcttaccattttaagaatgaaataaacactattttgaagaaaaaatacactgataattatattaacaataataatattattactaaccctaattataataatttatatgccattgctctcgaatttaggcttctacgccaacatggctatacagtacctcaagaaatttttaatgctttcaaggataagagagggaaatttaaaacatgcttgagtgatgatattatgggagtattgtgtttatatgaagcttcattctatgctatgaaacatgagaatattttggaggaaacaagaattttttcaactaaatgtcttaaaaaatacatggagaaaatggagaatgaggaagagaaaaaaatattattattagatgataataatattaatagtaatttgctattaattaatcacgctttcgagcttccgcttcattggagaataacaagatcggaagctaggtggttcattgacgaaatatatgagaaaaaacaagacatgaattcgactttgttcgagtttgcgaaattagattttaatatagtgcaatcaacacaccaagaagatttacaacatttatcgaggtggtggagggattgtaaacttggtgggaaattgaattttgctagagatagattgatggaagctttcttatgggatgttggactaaaattcgagggagaattcagctattttagaagaataaatgcaagattatttgtgcttataacaataattgatgatatttatgatgtatatggaactttggaggaattagagcttttcactagtgctgtcgaaagatgggatgtgaaattaatcaatgagttaccagattacatgaagatgcctttctttgttttacacaataccataaatgagatggggttcgatgtattagtacaacaaaactttgtcaacattgaataccttaagaaatcgtgggtagatttatgtaaatgttatttacaagaagcaaaatggtattatagtggataccaaccaacattggaagaatacactgagttgggttggctttcaataggagcatcagtaattcttatgcatgcttatttttgtttcacaaatcctataacaaaacaagacttgaaaagcttgcaattacaacatcattatcccaacataattaaacaagcatgcttgattacaaggcttgcagatgatttaggaacatcttcggatgaattgaatagaggcgacgttcctaaatcgattcaatgttacatgtacgataataatgctacagaagacgaagctcgtgaacacatcaagttcttgataagtgaaacatggaaggatatgaataagaaagatgaagatgagagttgtttatcagaaaattttgttgaagtttgcaaaaatatggctagaacagcactattcatatatgagaatggagatggacatggttctcagaatagtttatcaaaagaacgtatttcaaccttgattattactccaattaatattcctaaa

SEQ ID NO: 1392 - DNA, 1848 bp, synthetic construct
  misc_feature 1..1848: note = Description of Artificial Sequence: Synthetic polynucleotide
  source 1..1848: mol_type = other DNA
ttgggagttcatcaattttctccactttcattaatccttagttctacaaaattagcaagagcaagagaaagtaataaatcaagattatcaagtgcttgctaccccatccaatgtactatggtcaatagtacaaatattcctaataatactactatatttgataatcatattcatagaagatcagccaattatgaacctcccatttggtcttttgattacattcaatctctttcatcaagccaatataagggagaaacatgtacaagtagattgaatgagctagaagcaaatgtgaaagagatattgttagttgagatgaaatttaactctttagctcaacttgagttgattgatgcattgcaaagacttggattatcttatcgtttcgagactgaaataaacactattttgaataaaaattactccaataatgttatcaataaccctaattataatttgtacgccacagctctcgaatttaggcttctacgacaacatggttatgatgtatctcaagaaattttcaatgtgtttaaggatgagattacaagcaagttcaaggcaagaaggagtagcaaagatataattggagtattggctttatacgaagcttcattctatggcaaaaaaggcgaaagtattttggaagaagctagggtttcctcaaccaaatgtcttgaaaattatgcagcgacgatgacgatggagcaaagcaatccatcattattagttaatgattatgatgatgataataatatgttattattagtaaatcatgtcttggagcttccacttcattggagaataacaagatcagaagcaaggtggttcattgatttatatgaaaaaaatcataacatgaattctactttgcttgaatttgccaaattggattacaacatggtacaatcaatatatcaagaagatctaaaacatctctcaaggtggtggagccatacaaaacttggagagaaaatggatttctttagagttagaataatggagtgtttcttatggactgtgggagtaacatgtgagccagaacaaagctattatagaagaatgtctggaagattgtatgttctaataacaacaattgatgatatatatgatgtttatggaacattggaggaattagagcttttcactaatgctgttgagagatgggatgtgaaagcaatggatgatttaccagaatatatgaggatgcctttctttcttttacacaataccataaatgaaatggctttcgatgtgttaggagaccaaaatttcctcaacattaaattccttaagaaaacgtgggcagatttttgtaaacatcaattacaagaggcgaaatggtttcacagtggatacaaaccaacattcgaagaatacattaacaatgcatggatttcagtatcaggaccgattattcttattgatgcttatttctctcttacaaatcctgttacaaaagatgccataaatttactggaattaggttatccacccatattttaccacgcatccatgattctacgacttacagatgatctgggaacatcgcctgatgaaatgaaaagaggtgatattccaaaatcaattcaatgttacatgaacgatacaggtgtttctgaagatgaagctcgagatcatatgaagtttctaataagtgaattatggaaggaaataaataatgaagatgaaaatatggactctcctttctcaaaacaatttcttcaaaattgtaaaaatcttgctagaatatcacaatttatatatcaatatggagatggacatgcttctcaggatagtttatcaaaacaaagaatttcagaattgataattaatcatattccttct

SEQ ID NO: 1393 - DNA, 1785 bp, synthetic construct
  misc_feature 1..1785: note = Description of Artificial Sequence: Synthetic polynucleotide
  source 1..1785: mol_type = other DNA
gtattttttagaccaaaagtatatactaattataatattattaataataatgctacaaaatcaagattatcaagtgcatgctaccccatccaatgtgctgtggtcaatagttctaatgcaattattgatcgacgatctgccaactttgagccctccatttggtcttttgattatattcaatctcttacaagtcaatataagggagaaccttatacaagtcgagtgaaaaaacttgagagagatgtgaaaaagatgttagttgagatggaaaactctttagctcaacttgaactcattgatacattgcaaagacttggaatatcttaccgttttgagaatgaaataaattctattttgaacaaaaaatatgttaatattaataatcctaattataatttatatgccattgctcttcaatttaggcttctacgtcaacatggctatgcagtacctcaagagatttttaatcagttgaaggacgagatagaaaacatcaaaaaacacataaatggtaatgatatcatgggagtattagccttatacgaagcttctttttatgagaaaaaaggcgaaagtattttaaaggaagctagaattttcacaactaaatgtctcaaaaactacactataatgatatcagagcaaaaaaagttaatgattgataatgattatgattatgatatcgaagtagtgaatcatgccttagagctcccacttcatcggaggaccacaagaacagaagcaaagtggttcattgacgcatatgcgaaaaaacaagacatgaatcctatgttgcttgagttagccaaactcgatttcaacatagtacaatcaacacatcatgaagatctaaaacatatattcaggtggtggagacatactaaacttggagagaaattgaattttgcaagagatcgattgatggaatgtttcttatggaatattggaataagatttgagtcaaaattcagctattttagaacaaaaactgccaaattatttgagctagtaacatttatagatgatatatatgatgtttatggaacattggatgaattagagcttttcaccaaagctgttgagagatgggatgtgaaaatgataaatgagttaccagaatacatgaagatgccttatcttgttttacacaataccataaatgatatggtatttgaggtgttaagagaccaagaaatttccatcaacattcaataccttaagaaaacgtgggtcgatatgtgtaaaagtttcttgcaagaggcaaaatggtactatagtggatacacaccaacattggaagaatatattgaaaatggttggatttcagtaggagcaccagttattcttgtgcatgcttatttttttcacgcaaataataatcgtacaattacaaatactaaagagattttcgaatgcttggaatatggttattatcctgccattattcgtcacagtgccataatattacgatttacaaatgacctagcaacatcatcggaggaattgaaaagaggtgatgctccgacatcaattcaatgttacatgcaagaaaaaaatgtatctgaagaggaagctcgtgaacatgttaagtttttaataaatgaagcatggaaggagatgaataatgatgttggattatatccaatctcattgactgaagatgctacaaactttgctaagatgggatttttcatatatcaacatggtgatggtcatagttctcaagataatcaatccaaacaaaaaatttcatccttgattattgaacctattcccctatataca

SEQ ID NO: 1394 - DNA, 1833 bp, synthetic construct
  misc_feature 1..1833: note = Description of Artificial Sequence: Synthetic polynucleotide
  source 1..1833: mol_type = other DNA
ttgggagttcatcaattttctccactttcattaatccttaatactacaaaattagcaagagcaagtacattatcaagtgcttgctaccccatccaatgtactatggtcaatagtacaaatattactaataatactactatatttgataatcatattcatagaagatcagccaattatgaacctcccatttggtcttttgattacattcaatctctttcatcaagccaatataagggagaaacatgtacaagtagattgaatgagctagaggcaaatgtgaaagagatattgttagttgagatgaaatctaactctttagctcaacttgagtttattgatgcattgcaaagacttggattatcttaccgtttcgagactgaaataaacactattttaaatgaaaagtactccggtaatattatcgataaccctaattataatttgtacgccacagctctcgaattcaggcttctacgccatcatggttatgatgtatctcaagaaattttcaatgtgtttaaggatgagattacaagcaagttcaaggcaagaacgagtggcgaagatataattggagtattggctttatacgaagcttcattctatggcaaaaaaagtgaaagtattttggaagaagctagggtttcctcaatcgaatgtctcgaaaattacgtagcaactatgacgatggagcgaaacaaaccatcattattagtcaatgattatgatgatgataataatatgttattattagtgaatcatgccttggagcttccactttattggagaataacaagatcagaagcaaggtggttcattgatttatatgaaaaaaatcataacatgaattctactttgcttgaatttgccaaattggattacaacatggtacaatccatatatcaagaagatctaaaacatctctcaaggtggtggagccatacaaaacttggagagaaaatggatttctttagagatagattaatggagtgtttcttatggactgtgggaatagcatgtgagccagaaaaaagctattatagaagaatgtctggaagattatatgttctaataacaacaattgatgatatatatgatgtttatggaacattggaggaattagagcttttcactaatgcagttgagagatgggatgtgaaagcaatggatgatttaccagaatatatgaggatgcctttctttcttttacacaataccataaacgaaatggctttcgatgtgttaggacaccaaaatttcctcaacgttaaattccttaagaggacgtgggtagatttctgtaaacatcaattacaagaggcaaaatggtttcacagtggatacaaaccaacattcgaagaatacattaacaatgcatggatttcggtatcaggaccgattattcttatggatgcttatttctctcttacaaatcctgttacaaaagatgccataaatttactggaattaggttatccacccataatttaccatgcatccatgattctacgacttacagatgatctaggaacatcgaatgatgaaatgaaaagaggtgatattccgaaatcaattcaatgttacatgaacgatacaggtgtttctgaagatgaagctcgagatcatatgaagtttctaataagtgaattatggaaggaaataaataatgaagatgaaaatatggactctcctttctcaaaacaatttcttcaaaattgtaaaaatcttgctagaatatcacaatttatatatcaatatggagatggacatgcttctcaggatagtttatcaaaacaaagaatttcagaattgataattaatcatattccttct

SEQ ID NO: 1395 - DNA, 1791 bp, synthetic construct
  misc_feature 1..1791: note = Description of Artificial Sequence: Synthetic polynucleotide
  source 1..1791: mol_type = other DNA
gtattttatagaccaaaaatatatactaactataatattattaatggtggtacaaaatcaagattatcaagtgcatgctaccccatcatatgtgctgtggtcaatagttctaatgcaattattgatcgacgatctgccaactttgagccctccatttggtcttttgattatattcaatctcttacaagccaatataaggaagaatcttatacaggtcgagtcaaagaattggagatagatgtgaaaaagatgttaattgagatggaaaattctttaattcaacttgaactcattgacacattgcaaagacttggagtatcttatcgttttgaggatgaaataaatactattttgaaagaaaaatatattaatatgatcaataaccctaattataataatttatatgtcactgctcttgaatttaggcttctacgtcaacatggctatgcagtacctcaagagatttttaatcattttaaggacgagataggaaaaatcaaaacgaacatgattagtgatgatattatggaagtattggccttatatgaagcttcattctatgagaaaaaggaaagtattttagaagaagttagaattttcacaactcaatatctaaagaactacattataatgatatcacaagaaagaaagttaatgattgataatgataatgattatgattatgatatcgaaatagtgaatcacgctttggagctcccacttcattggaggactacaagaacagaagctaagtggttcatcgacgcgtatgagaaaaaacaagacatgaatcctattttgcttgagtttgctaaactcgatttcaacatgatacaatcaacacatcatgacgatctaaaacatatattcaggtggtggaggcatactaaacttggggagaaattgaattttgcaagagatcgattgatggaatgtttcttatggaaagttggaataagatttgagccaaaattcagttattttagaaaaacaactgccaaattatttgagctaataacagtaattgatgatatatatgatgtttatggaacattggatgaattagagcttttcaccaaagctattgagagatgggatatggaaatgataaatgagttaccagaatatatgaagatgccttatattgttttacacaataccattaatgaaatggtatttgaggtattaagagaccaacacatctccatcaacattcaataccttaagaaaacgtgggtagatatgtgtagaggttttttacaagaggcaaaatggtactatagtggatatacaccaacactagaagaatatattaaaaatggttggatttcagtgggagcaccggttctaattgtgcatgcttatttttctcatgcaaattataatcacacagttacaagtagtaaagagattttcgaatgctttgaacatggttattatcccgccataattcgtcatagtgccataatattacgacttacaaatgacctagcaacatcatcggaggaactgaaaagaggtgatgctccgacatcaattcaatgttatatgcaagaaaaaaaagtatctgaggagaaagctcgtgaacatattaagtttttaataagtgaaatatggaaagagatgaataatgatgttggattatatccaatctcattgattgaagatgctacaaattttgctaagatgggatttttcatgtatcagcatggtgatggtcatagttctcaagataatcaatccaaacaaaaaatttcatccttgattattgaacctattcccttatataca

SEQ ID NO: 1396 - DNA, 2152 bp, synthetic construct
  misc_feature 1..2152: note = Description of Artificial Sequence: Synthetic polynucleotide
  source 1..2152: mol_type = other DNA
gacttgtaatatcatcgaaattgaaagacacaggaaaaatataaaaataaataaaagataaacattatggacacacagagaaaattgcaagcagagcaactatcttgcccaaccaagtctcatgaactaatatttgatcataaatctgatcatcaaagacgttcggccaattatacgccaaccatttggaaatatgatttcctggagtctcttaacaacaaatatgatagtgaagagtacaaaaagctgtctgagaagcttatcgaggatgtgaggcatattattgttgaaactaaagacttaaagggtatgctagagctgattaacaccatcagaaaactaagcttgacatatcatttcgaagacgaagtcaagaaagttcttgacaaaatatcatcttccgattactactacaacaataatgacattaaagatcccctcgtaggagacgatctctatctcgctgcattatatttcaggcttcttaggcttcatggatatcatgtttcacaaggcatatttgttgggtacaatagtgtggattacaaaaaaggtggtgggacacataatattacatcaacagaggtgaaagtgatgatagagcttttagaggcctcacatgtagcttttgagtgtgaggagatgctaactgaggctaaagctttgatggaagaaaacctcaaaattgcctttcctgacaacggcaacaaatatcttcccaaacatgaggtggttcatgctttggaacttccatctcattggagggttcagtggtttgacgtaaaatggcaaatagaagcttatcgtcaaggtgacccggataccaacactacaactactactagtctcttggttgatttagccaaattaaactttaacatagttcaagccacacttcaaaaagatcttagggagttgtccagttggtggaagaatgtgggcctttcagagaagttggattttgcgagagataggctggtcgagagcttcatgtgtactgtgggactggcttttcagcctgaatacaaaagtctgagaaaatgtcttaccaaagtggtcaatttcatactcattgttgatgatgtttatgatgtttatggctcattggaagagctcagacacttcaccaatgccgttgataggtgggatgtacgggaaactgaaaaacttccagattgcatgaagatttgtttccaagcactctaccatactacatgtgaaattgctagtgaaattgagactaagaacggttgcaagttagttttacctcatctaaagggagcgtggacagacttttgtaaatcactattaatggaggcagaatggtaccacaaggggtatatcccatccattgaggagtatttaagcaatgcttggatttcatcttcgggccctcttcttcttcttcattcatatcttgctatgccaaatcagactaatacggcctcttctcttgacataagcaaagatcttgtctacaacatttctctcatcattcgactatgcaacgatttaggaacttcagcggctgaacaggaaagaggagatgctgcatcttctatcgtatgttatatgcaagaaacgaagagtagtgaagaggaggcccgaaagcatatccgagaaatgattagaaaaacatggaagaagatcaacaagacatgctttagtacttgcggcagtagttcactatcattatcatttatagatattgcccttaacactgctcgagtggcacatagcctctaccaatctggagatgccttcagtgctcaacatacagactataagactcatattctctccttactcgttcaccctctcattcccaataagtaaactagctaggatgatgagtcctttaatgggtcaccatgtgttttcttttttataattaatagaaaaatttaggtggttaagcagtttattacaggttatgttatgattaattattattattattattattattattatttgttttctttttcatagtaattaagtttaagttttttatgtacaactcttcaaagcacgtgaacgatgtctcctgtactttgaggaattgagaatgtgtgtttgtcgttggtggttgatcactatagctagttgttatgtatcgtggtgattttagtgtaatttatattcagataaa

SEQ ID NO: 1397 - DNA, 1761 bp, synthetic construct
  misc_feature 1..1761: note = Description of Artificial Sequence: Synthetic polynucleotide
  source 1..1761: mol_type = other DNA
aattataattttgttagtagtactacaagatcaagattatcaagatcaagtgcttgctaccccattcaatgtactgtagtcgatagttctaatccaatgatcgatcgacgatcgggcaactatgaaccatccatttggtcttttgattatattcagtctcttacaagccaatatgagggagaaccttatagaagtcgggtgaaagagatcgagggagatgtgaaaaggatgctagttgagatggaaaattctttagctcaacttgagctcattgacacattgcaaagacttggagtatcttatcgctttgagaatgaaataagtactattttgaaggaaaaatatgtcaatgttaataaccctaattataatttatacgccattgctcttgaatttagacttctacgtcaacatggttatgcagtacctcaagagatttttaatcattttaaggacgagacaggaaaattcaaggcaaacataattagtgatgatattatgggagtattggccttatatgaagcttcattctatgagaaaaaaggcgaaagtattttagaggaagctagaattttcataaaaaaatatctcgaagactacactataatgatatcgcaagaaaagaaattaatgattgataatgattatgattataatttcgaagtagtgaatcatgcattagagctcccacttcattggaggactacaagaatagaagctaagtggttcatcgacgcgtatgagaaaaaacaagacatgaatcctattttgcttgaatttgctaaactcgatttcaacatgatacaatcaacacatcatgatgatctaaaacatatattcaggtggtggaggcatactaaacttggggagaaattgaattttgcaagagatcgattgatggaatgtttcttatggaaggttggagtaagatttgagccaaaattcagttattttagaaaaacaactgccaaattatatgagctaataacattaattgatgatatatatgatgtttatggaacattggatgaattagagcttttcaccaaagctgttgagagatgggatgtgacaatgataaatgagttaccagaatacatgaagatgccttttcttgttttacacaatacaataaatgaaatagtatttgagatattaagagacaaagacatctccatcaacattcaataacttaagaaaacgtggatagatatgtgtagaggttttctacaagaagcaaaatggtactatagtggatacacaccaacattggaagaatatatagaaaatggttggatctcagtgggagcaccagttcttattgtgcatgcttatttttctcattcaaataataataaacttgtctaagtttcagatgaagaagtggaatgtcttaaagagggttatcccaatattgttcgacatggatccctaatattacgacttgcagatgatctaggaacatgttcggatgaaatgaaaagaggcgatgttcctacatcaattcaatgttacatgcatgatactggtgtttctgaagacgaagctcgtgagcacatcaagcatttgataagcgaatcatggaaggagatgaataatgaaaatggagatcataattcttctttctcgaaagaatttgttcatgtttgcaaaaatcttggtagagcgtcacaatttatataccaatatggagatggacatgcttctcaaaatactctatcaaaagatcgtatttttaaaattattattaatcctttcccc

SEQ ID NO: 1398 - DNA, 20 bp, synthetic construct
  misc_feature 1..20: note = Description of Artificial Sequence: Synthetic primer
  source 1..20: mol_type = other DNA
tgctacatgcgtgaaaaggg

SEQ ID NO: 1399 - DNA, 22 bp, synthetic construct
  misc_feature 1..22: note = Description of Artificial Sequence: Synthetic primer
  source 1..22: mol_type = other DNA
tgtgatacatctccattgctcc

SEQ ID NO: 1400 - DNA, 20 bp, synthetic construct
  misc_feature 1..20: note = Description of Artificial Sequence: Synthetic primer
  source 1..20: mol_type = other DNA
tttttttttttttttttttt

1. (canceled)

2. A method of analyzing a plant cultivar comprising at least one terpene synthase gene or a paralog thereof, the method comprising:
(a) obtaining a nucleic acid sample from the plant cultivar, wherein the plant cultivar is a Cannabis plant cultivar;
(b) contacting the nucleic acid sample with at least one polynucleotide primer pair under amplification conditions, thereby preparing a mixture, wherein:
(i) the polynucleotide primer pair hybridizes to a unique subsequence of the terpene synthase gene or a paralog thereof,
(ii) the unique subsequence of the terpene synthase gene or a paralog thereof is different than the other subsequences of the terpene synthase gene or a paralog thereof,
(iii) the unique subsequence of the terpene synthase gene or a paralog thereof is different than the subsequences of other terpene synthase genes and/or paralogs thereof,
(iv) the unique subsequence is an exon or a portion within an exon of the terpene synthase gene or paralog thereof, and
(v) each of the primers of the polynucleotide primer pair hybridizes to a conserved region of the unique subsequence and the hybridized polynucleotide primer pair flanks a variable region of the unique subsequence;
(c) amplifying the mixture, thereby obtaining an amplified mixture; and
(d) analyzing the amplified mixture of (c), whereby at least one terpene synthase gene or a paralog thereof is identified and/or quantified in the amplified mixture.

3. The method of claim 2, wherein the Cannabis plant cultivar comprises a plurality of terpene synthase genes and/or paralogs thereof and the method comprises:
in (b), contacting the nucleic acid sample with a plurality of polynucleotide primer pairs under amplification conditions, thereby preparing a mixture, wherein:
(i) each polynucleotide primer pair hybridizes to a unique subsequence of a first terpene synthase gene or a paralog thereof,
(ii) the unique subsequence of the first terpene synthase gene or a paralog thereof is different than the other subsequences of the first terpene synthase gene or a paralog thereof,
(iii) the unique subsequence of the first terpene synthase gene or a paralog thereof is different than the unique subsequences of the other terpene synthase genes and/or paralogs thereof in the plurality of terpene synthase genes and/or paralogs thereof,
(iv) each unique subsequence is an exon or a portion within an exon of a corresponding target terpene synthase gene or paralog thereof, and
(v) each of the primers of the plurality of polynucleotide primer pairs hybridizes to a conserved region of the unique subsequence of its corresponding target terpene synthase gene or paralog thereof, and each of the plurality of hybridized polynucleotide primer pairs flanks a variable region of the unique subsequence of its corresponding target terpene synthase gene or paralog thereof.

4. The method of claim 2, wherein the identification in (d) is by one or more of high-resolution melting (HRM), quantitative PCR (qPCR), loop-mediated isothermal amplification (LAMP), restriction endonuclease digestion, gel electrophoresis and sequencing.

5. The method of claim 4, wherein the identification in (d) is by high-resolution melting (HRM) or quantitative PCR (qPCR).

6. The method of claim 5, wherein at least one polynucleotide primer pair is selected from among one or more of the following primer pairs:
SEQ ID NO: 1 and SEQ ID NO:2, SEQ ID NO:3 and SEQ ID NO:4,
SEQ ID NO:5 and SEQ ID NO:6, SEQ ID NO:7 and SEQ ID NO:8,
SEQ ID NO:9 and SEQ ID NO:10, SEQ ID NO: 11 and SEQ ID NO: 12,
SEQ ID NO: 13 and SEQ ID NO: 14, SEQ ID NO: 15 and SEQ ID NO: 16,
SEQ ID NO: 17 and SEQ ID NO: 18, SEQ ID NO: 19 and SEQ ID NO:20,
SEQ ID NO:21 and SEQ ID NO:22, SEQ ID NO:23 and SEQ ID NO:24,
SEQ ID NO:25 and SEQ ID NO:26, SEQ ID NO:27 and SEQ ID NO:28,
SEQ ID NO:29 and SEQ ID NO:30, SEQ ID NO:31 and SEQ ID NO:32,
SEQ ID NO:33 and SEQ ID NO:34, SEQ ID NO:35 and SEQ ID NO:36,
SEQ ID NO:37 and SEQ ID NO:38, SEQ ID NO:39 and SEQ ID NO:40,
SEQ ID NO:41 and SEQ ID NO:42, SEQ ID NO:43 and SEQ ID NO:44,
SEQ ID NO: 45 and SEQ ID NO:46, SEQ ID NO:47 and SEQ ID NO:48,
SEQ ID NO:49 and SEQ ID NO:50, SEQ ID NO:51 and SEQ ID NO:52,
SEQ ID NO:53 and SEQ ID NO:54, SEQ ID NO:55 and SEQ ID NO:56,
SEQ ID NO:57 and SEQ ID NO:58, SEQ ID NO:59 and SEQ ID NO:60,
SEQ ID NO:61 and SEQ ID NO:62, SEQ ID NO:63 and SEQ ID NO:64,
SEQ ID NO:65 and SEQ ID NO:66, SEQ ID NO:67 and SEQ ID NO:68,
SEQ ID NO:69 and SEQ ID NO:70, SEQ ID NO:71 and SEQ ID NO:72,
SEQ ID NO:73 and SEQ ID NO:74, SEQ ID NO:75 and SEQ ID NO:76,
SEQ ID NO:77 and SEQ ID NO:78, SEQ ID NO:79 and SEQ ID NO:80,
SEQ ID NO:81 and SEQ ID NO:82, SEQ ID NO:83 and SEQ ID NO: 84,
SEQ ID NO:85 and SEQ ID NO:86, SEQ ID NO:87 and SEQ ID NO:88,
SEQ ID NO:89 and SEQ ID NO:90, SEQ ID NO:91 and SEQ ID NO:92,
SEQ ID NO:93 and SEQ ID NO:94, SEQ ID NO:95 and SEQ ID NO:96,
SEQ ID NO:97 and SEQ ID NO:98, SEQ ID NO:99 and SEQ ID NO: 100,
SEQ ID NO: 101 and SEQ ID NO: 102, SEQ ID NO: 103 and SEQ ID NO: 104,
SEQ ID NO: 105 and SEQ ID NO: 106, SEQ ID NO: 107 and SEQ ID NO: 108,
SEQ ID NO: 109 and SEQ ID NO: 110, SEQ ID NO: 111 and SEQ ID NO: 112,
SEQ ID NO:113 and SEQ ID NO:114, SEQ ID NO: 115 and SEQ ID NO: 116,
SEQ ID NO: 117 and SEQ ID NO: 118, SEQ ID NO: 119 and SEQ ID NO: 120,
SEQ ID NO: 121 and SEQ ID NO: 122, SEQ ID NO: 123 and SEQ ID NO: 124,
SEQ ID NO: 125 and SEQ ID NO: 126, SEQ ID NO: 127 and SEQ ID NO: 128,
SEQ ID NO: 129 and SEQ ID NO: 130, SEQ ID NO: 131 and SEQ ID NO: 132,
SEQ ID NO: 133 and SEQ ID NO: 134, SEQ ID NO: 135 and SEQ ID NO: 136,
SEQ ID NO: 137 and SEQ ID NO: 138, SEQ ID NO: 139 and SEQ ID NO: 140,
SEQ ID NO: 141 and SEQ ID NO: 142, SEQ ID NO: 143 and SEQ ID NO: 144,
SEQ ID NO: 145 and SEQ ID NO: 146, SEQ ID NO: 147 and SEQ ID NO: 148,
SEQ ID NO: 149 and SEQ ID NO: 150, SEQ ID NO: 151 and SEQ ID NO: 152,
SEQ ID NO: 153 and SEQ ID NO: 154, SEQ ID NO: 155 and SEQ ID NO: 156,
SEQ ID NO: 157 and SEQ ID NO: 158, SEQ ID NO: 159 and SEQ ID NO: 160,
SEQ ID NO: 161 and SEQ ID NO: 162, SEQ ID NO: 163 and SEQ ID NO: 164,
SEQ ID NO: 165 and SEQ ID NO: 166, SEQ ID NO: 167 and SEQ ID NO: 168,
SEQ ID NO: 169 and SEQ ID NO: 170, SEQ ID NO: 171 and SEQ ID NO: 172,
SEQ ID NO: 173 and SEQ ID NO: 174, SEQ ID NO: 175 and SEQ ID NO: 176,
SEQ ID NO: 177 and SEQ ID NO: 178, SEQ ID NO: 179 and SEQ ID NO: 180,
SEQ ID NO: 181 and SEQ ID NO: 182, SEQ ID NO: 183 and SEQ ID NO: 184,
SEQ ID NO: 185 and SEQ ID NO: 186, SEQ ID NO: 187 and SEQ ID NO: 188,
SEQ ID NO: 189 and SEQ ID NO: 190, SEQ ID NO: 191 and SEQ ID NO: 192,
SEQ ID NO: 193 and SEQ ID NO: 194, SEQ ID NO: 195 and SEQ ID NO: 196,
SEQ ID NO: 197 and SEQ ID NO: 198, SEQ ID NO: 199 and SEQ ID NO:200,
SEQ ID NO:201 and SEQ ID NO:202, SEQ ID NO:203 and SEQ ID NO:204,
SEQ ID NO:205 and SEQ ID NO:206, SEQ ID NO:207 and SEQ ID NO:208,
SEQ ID NO:209 and SEQ ID NO:210, SEQ ID NO:211 and SEQ ID NO:212,
SEQ ID NO:213 and SEQ ID NO:214, SEQ ID NO:215 and SEQ ID NO:216,
SEQ ID NO:217 and SEQ ID NO:218, SEQ ID NO:219 and SEQ ID NO:220,
SEQ ID NO:221 and SEQ ID NO:222, SEQ ID NO:223 and SEQ ID NO:224,
SEQ ID NO:225 and SEQ ID NO:226, SEQ ID NO:227 and SEQ ID NO:228,
SEQ ID NO:229 and SEQ ID NO:230, SEQ ID NO:231 and SEQ ID NO:232,
SEQ ID NO:233 and SEQ ID NO:234, SEQ ID NO:235 and SEQ ID NO:236,
SEQ ID NO:237 and SEQ ID NO:238, SEQ ID NO:239 and SEQ ID NO:240,
SEQ ID NO:241 and SEQ ID NO:242, SEQ ID NO:243 and SEQ ID NO:244,
SEQ ID NO:245 and SEQ ID NO:246, SEQ ID NO:247 and SEQ ID NO:248,
SEQ ID NO:249 and SEQ ID NO:250, SEQ ID NO:251 and SEQ ID NO:252,
SEQ ID NO:253 and SEQ ID NO:254, SEQ ID NO:255 and SEQ ID NO:256,
SEQ ID NO:257 and SEQ ID NO:258, SEQ ID NO:259 and SEQ ID NO:260,
SEQ ID NO:261 and SEQ ID NO:262, SEQ ID NO:263 and SEQ ID NO:264,
SEQ ID NO:265 and SEQ ID NO:266, SEQ ID NO:267 and SEQ ID NO:268,
SEQ ID NO:269 and SEQ ID NO:270, SEQ ID NO:271 and SEQ ID NO:272,
SEQ ID NO:273 and SEQ ID NO:274, SEQ ID NO:275 and SEQ ID NO:276,
SEQ ID NO:277 and SEQ ID NO:278, SEQ ID NO:279 and SEQ ID NO:280,
SEQ ID NO:281 and SEQ ID NO:282, SEQ ID NO:283 and SEQ ID NO:284,
SEQ ID NO:285 and SEQ ID NO:286, SEQ ID NO:287 and SEQ ID NO:288,
SEQ ID NO:289 and SEQ ID NO:290, SEQ ID NO:291 and SEQ ID NO:292,
SEQ ID NO:293 and SEQ ID NO:294, SEQ ID NO:295 and SEQ ID NO:296,
SEQ ID NO:297 and SEQ ID NO:298, SEQ ID NO:299 and SEQ ID NO:300,
SEQ ID NO:301 and SEQ ID NO:302, SEQ ID NO:303 and SEQ ID NO:304,
SEQ ID NO:305 and SEQ ID NO:306, SEQ ID NO:307 and SEQ ID NO:308,
SEQ ID NO:309 and SEQ ID NO:310, SEQ ID NO:311 and SEQ ID NO:312,
SEQ ID NO:313 and SEQ ID NO:314, SEQ ID NO:315 and SEQ ID NO:316,
SEQ ID NO:317 and SEQ ID NO:318, SEQ ID NO:319 and SEQ ID NO:320,
SEQ ID NO:321 and SEQ ID NO:322, SEQ ID NO:323 and SEQ ID NO:324,
SEQ ID NO:325 and SEQ ID NO:326, SEQ ID NO:327 and SEQ ID NO:328,
SEQ ID NO:329 and SEQ ID NO:330, SEQ ID NO:331 and SEQ ID NO:332,
SEQ ID NO:333 and SEQ ID NO:334, SEQ ID NO:335 and SEQ ID NO:336,
SEQ ID NO:337 and SEQ ID NO:338, SEQ ID NO:339 and SEQ ID NO:340,
SEQ ID NO:341 and SEQ ID NO:342, SEQ ID NO: 343 and SEQ ID NO:344,
SEQ ID NO:345 and SEQ ID NO:346, SEQ ID NO:347 and SEQ ID NO:348,
SEQ ID NO:349 and SEQ ID NO:350, SEQ ID NO:351 and SEQ ID NO:352,
SEQ ID NO:353 and SEQ ID NO:354, SEQ ID NO:355 and SEQ ID NO:356,
SEQ ID NO:357 and SEQ ID NO:358, SEQ ID NO:359 and SEQ ID NO:360,
SEQ ID NO:361 and SEQ ID NO:362, SEQ ID NO:363 and SEQ ID NO:364,
SEQ ID NO:365 and SEQ ID NO:366, SEQ ID NO:367 and SEQ ID NO:368,
SEQ ID NO:369 and SEQ ID NO:370, SEQ ID NO:371 and SEQ ID NO:372,
SEQ ID NO:373 and SEQ ID NO:374, SEQ ID NO:375 and SEQ ID NO:376,
SEQ ID NO:377 and SEQ ID NO:378, SEQ ID NO:379 and SEQ ID NO:380,
SEQ ID NO:381 and SEQ ID NO:382, SEQ ID NO:383 and SEQ ID NO:384,
SEQ ID NO:385 and SEQ ID NO:386, SEQ ID NO:387 and SEQ ID NO:388,
SEQ ID NO:389 and SEQ ID NO:390, SEQ ID NO:391 and SEQ ID NO:392,
SEQ ID NO:393 and SEQ ID NO:394, SEQ ID NO:395 and SEQ ID NO:396,
SEQ ID NO:397 and SEQ ID NO:398, SEQ ID NO:399 and SEQ ID NO:400,
SEQ ID NO:401 and SEQ ID NO:402, SEQ ID NO:403 and SEQ ID NO:404,
SEQ ID NO:405 and SEQ ID NO:406, SEQ ID NO:407 and SEQ ID NO:408,
SEQ ID NO:409 and SEQ ID NO:410, SEQ ID NO:411 and SEQ ID NO:412,
SEQ ID NO:413 and SEQ ID NO:414, SEQ ID NO: 415 and SEQ ID NO:416,
SEQ ID NO:417 and SEQ ID NO:418, SEQ ID NO:419 and SEQ ID NO:420,
SEQ ID NO: 421 and SEQ ID NO: 422, SEQ ID NO: 423 and SEQ ID NO:424,
SEQ ID NO:425 and SEQ ID NO:426, SEQ ID NO:427 and SEQ ID NO:428,
SEQ ID NO:429 and SEQ ID NO:430, SEQ ID NO:431 and SEQ ID NO:432,
SEQ ID NO: 433 and SEQ ID NO:434, SEQ ID NO:435 and SEQ ID NO:436,
SEQ ID NO: 437 and SEQ ID NO:438, SEQ ID NO:439 and SEQ ID NO:440,
SEQ ID NO:441 and SEQ ID NO:442, SEQ ID NO: 443 and SEQ ID NO:444,
SEQ ID NO: 445 and SEQ ID NO:446, SEQ ID NO:447 and SEQ ID NO:448,
SEQ ID NO: 449 and SEQ ID NO:450, SEQ ID NO:451 and SEQ ID NO:452,
SEQ ID NO: 453 and SEQ ID NO:454, SEQ ID NO:455 and SEQ ID NO:456,
SEQ ID NO: 457 and SEQ ID NO:458, SEQ ID NO:459 and SEQ ID NO:460,
SEQ ID NO: 461 and SEQ ID NO:462, SEQ ID NO: 463 and SEQ ID NO:464,
SEQ ID NO: 465 and SEQ ID NO:466, SEQ ID NO:467 and SEQ ID NO:468,
SEQ ID NO:469 and SEQ ID NO:470, SEQ ID NO:471 and SEQ ID NO:472,
SEQ ID NO: 473 and SEQ ID NO:474, SEQ ID NO:475 and SEQ ID NO:476,
SEQ ID NO:477 and SEQ ID NO:478, SEQ ID NO:479 and SEQ ID NO:480,
SEQ ID NO: 481 and SEQ ID NO:482, SEQ ID NO:483 and SEQ ID NO:484,
SEQ ID NO: 485 and SEQ ID NO:486, SEQ ID NO:487 and SEQ ID NO:488,
SEQ ID NO:489 and SEQ ID NO:490, SEQ ID NO:491 and SEQ ID NO:492,
SEQ ID NO: 493 and SEQ ID NO:494, SEQ ID NO:495 and SEQ ID NO:496,
SEQ ID NO:497 and SEQ ID NO:498, SEQ ID NO:499 and SEQ ID NO:500,
SEQ ID NO:501 and SEQ ID NO:502, SEQ ID NO:503 and SEQ ID NO:504,
SEQ ID NO:505 and SEQ ID NO:506, SEQ ID NO:507 and SEQ ID NO:508,
SEQ ID NO:509 and SEQ ID NO:510, SEQ ID NO:511 and SEQ ID NO:512,
SEQ ID NO:513 and SEQ ID NO:514, SEQ ID NO:515 and SEQ ID NO:516,
SEQ ID NO:517 and SEQ ID NO:518, SEQ ID NO:519 and SEQ ID NO:520,
SEQ ID NO:521 and SEQ ID NO:522, SEQ ID NO:523 and SEQ ID NO:524,
SEQ ID NO:525 and SEQ ID NO:526, SEQ ID NO:527 and SEQ ID NO:528,
SEQ ID NO:529 and SEQ ID NO:530, SEQ ID NO:531 and SEQ ID NO:532,
SEQ ID NO:533 and SEQ ID NO:534, SEQ ID NO:535 and SEQ ID NO:536,
SEQ ID NO:537 and SEQ ID NO:538, SEQ ID NO:539 and SEQ ID NO:540,
SEQ ID NO:541 and SEQ ID NO:542, SEQ ID NO:543 and SEQ ID NO:544,
SEQ ID NO:545 and SEQ ID NO:546, SEQ ID NO:547 and SEQ ID NO:548,
SEQ ID NO:549 and SEQ ID NO:550, SEQ ID NO:551 and SEQ ID NO:552,
SEQ ID NO:553 and SEQ ID NO:554, SEQ ID NO:555 and SEQ ID NO:556,
SEQ ID NO:557 and SEQ ID NO:558, SEQ ID NO:559 and SEQ ID NO:560,
SEQ ID NO:561 and SEQ ID NO:562, SEQ ID NO:563 and SEQ ID NO:564,
SEQ ID NO:565 and SEQ ID NO:566, SEQ ID NO:567 and SEQ ID NO:568,
SEQ ID NO:569 and SEQ ID NO:570, SEQ ID NO:571 and SEQ ID NO:572,
SEQ ID NO:573 and SEQ ID NO:574, SEQ ID NO:575 and SEQ ID NO:576,
SEQ ID NO:577 and SEQ ID NO:578, SEQ ID NO:579 and SEQ ID NO:580,
SEQ ID NO:581 and SEQ ID NO:582, SEQ ID NO:583 and SEQ ID NO:584,
SEQ ID NO:585 and SEQ ID NO:586, SEQ ID NO:587 and SEQ ID NO:588,
SEQ ID NO:589 and SEQ ID NO:590, SEQ ID NO:591 and SEQ ID NO:592,
SEQ ID NO:593 and SEQ ID NO:594, SEQ ID NO:595 and SEQ ID NO:596,
SEQ ID NO:597 and SEQ ID NO:598, SEQ ID NO:599 and SEQ ID NO:600,
SEQ ID NO:601 and SEQ ID NO:602, SEQ ID NO:603 and SEQ ID NO:604,
SEQ ID NO:605 and SEQ ID NO:606, SEQ ID NO:607 and SEQ ID NO:608,
SEQ ID NO:609 and SEQ ID NO:610, SEQ ID NO:611 and SEQ ID NO:612,
SEQ ID NO:613 and SEQ ID NO:614, SEQ ID NO:615 and SEQ ID NO:616,
SEQ ID NO:617 and SEQ ID NO:618, SEQ ID NO:619 and SEQ ID NO:620,
SEQ ID NO:621 and SEQ ID NO:622, SEQ ID NO:623 and SEQ ID NO:624,
SEQ ID NO:625 and SEQ ID NO:626, SEQ ID NO:627 and SEQ ID NO:628,
SEQ ID NO:629 and SEQ ID NO:630, SEQ ID NO: 631 and SEQ ID NO:632,
SEQ ID NO:633 and SEQ ID NO:634, SEQ ID NO:635 and SEQ ID NO:636,
SEQ ID NO:637 and SEQ ID NO:638, SEQ ID NO:639 and SEQ ID NO:640,
SEQ ID NO:641 and SEQ ID NO:642, SEQ ID NO: 643 and SEQ ID NO:644,
SEQ ID NO:645 and SEQ ID NO:646, SEQ ID NO:647 and SEQ ID NO:648,
SEQ ID NO:649 and SEQ ID NO:650, SEQ ID NO:651 and SEQ ID NO:652,
SEQ ID NO:653 and SEQ ID NO:654, SEQ ID NO:655 and SEQ ID NO:656,
SEQ ID NO:657 and SEQ ID NO:658, SEQ ID NO:659 and SEQ ID NO:660,
SEQ ID NO:661 and SEQ ID NO:662, SEQ ID NO:663 and SEQ ID NO:664,
SEQ ID NO: 665 and SEQ ID NO:666, SEQ ID NO:667 and SEQ ID NO:668,
SEQ ID NO:669 and SEQ ID NO:670, SEQ ID NO:671 and SEQ ID NO:672,
SEQ ID NO:673 and SEQ ID NO:674, SEQ ID NO:675 and SEQ ID NO:676,
SEQ ID NO:677 and SEQ ID NO:678, SEQ ID NO:679 and SEQ ID NO:680,
SEQ ID NO: 681 and SEQ ID NO:682, SEQ ID NO: 683 and SEQ ID NO:684,
SEQ ID NO:685 and SEQ ID NO:686, SEQ ID NO:687 and SEQ ID NO:688,
SEQ ID NO: 689 and SEQ ID NO:690, SEQ ID NO:691 and SEQ ID NO:692,
SEQ ID NO:693 and SEQ ID NO:694, SEQ ID NO:695 and SEQ ID NO:696,
SEQ ID NO:697 and SEQ ID NO:698, SEQ ID NO:699 and SEQ ID NO:700,
SEQ ID NO:701 and SEQ ID NO:702, SEQ ID NO: 703 and SEQ ID NO:704,
SEQ ID NO:705 and SEQ ID NO:706, SEQ ID NO:707 and SEQ ID NO:708,
SEQ ID NO:709 and SEQ ID NO:710, SEQ ID NO:711 and SEQ ID NO:712,
SEQ ID NO:713 and SEQ ID NO:714, SEQ ID NO:715 and SEQ ID NO:716,
SEQ ID NO:717 and SEQ ID NO:718, SEQ ID NO:719 and SEQ ID NO:720,
SEQ ID NO: 721 and SEQ ID NO:722, SEQ ID NO: 723 and SEQ ID NO: 724,
SEQ ID NO:725 and SEQ ID NO:726, SEQ ID NO:727 and SEQ ID NO:728,
SEQ ID NO:729 and SEQ ID NO:730, SEQ ID NO:731 and SEQ ID NO:732,
SEQ ID NO:733 and SEQ ID NO:734, SEQ ID NO:735 and SEQ ID NO:736,
SEQ ID NO:737 and SEQ ID NO:738, SEQ ID NO:739 and SEQ ID NO:740,
SEQ ID NO:741 and SEQ ID NO:742, SEQ ID NO:743 and SEQ ID NO:744,
SEQ ID NO: 745 and SEQ ID NO:746, SEQ ID NO:747 and SEQ ID NO:748,
SEQ ID NO: 749 and SEQ ID NO:750, SEQ ID NO:751 and SEQ ID NO:752,
SEQ ID NO:753 and SEQ ID NO:754, SEQ ID NO:755 and SEQ ID NO:756,
SEQ ID NO:757 and SEQ ID NO:758, SEQ ID NO:759 and SEQ ID NO:760,
SEQ ID NO:761 and SEQ ID NO:762, SEQ ID NO:763 and SEQ ID NO:764,
SEQ ID NO:765 and SEQ ID NO:766, SEQ ID NO: 767 and SEQ ID NO:768,
SEQ ID NO:769 and SEQ ID NO:770, SEQ ID NO:771 and SEQ ID NO:772,
SEQ ID NO:773 and SEQ ID NO:774, SEQ ID NO:775 and SEQ ID NO:776,
SEQ ID NO:777 and SEQ ID NO:778, SEQ ID NO:779 and SEQ ID NO:780,
SEQ ID NO:781 and SEQ ID NO:782, SEQ ID NO:783 and SEQ ID NO:784,
SEQ ID NO:785 and SEQ ID NO:786, SEQ ID NO:787 and SEQ ID NO:788,
SEQ ID NO:789 and SEQ ID NO:790, SEQ ID NO:791 and SEQ ID NO:792,
SEQ ID NO:793 and SEQ ID NO:794, SEQ ID NO:795 and SEQ ID NO:796,
SEQ ID NO:797 and SEQ ID NO:798, SEQ ID NO:799 and SEQ ID NO:800,
SEQ ID NO: 801 and SEQ ID NO:802, SEQ ID NO: 803 and SEQ ID NO: 804,
SEQ ID NO:805 and SEQ ID NO:806, SEQ ID NO:807 and SEQ ID NO:808,
SEQ ID NO:809 and SEQ ID NO:810, SEQ ID NO:811 and SEQ ID NO:812,
SEQ ID NO:813 and SEQ ID NO:814, SEQ ID NO:815 and SEQ ID NO:816,
SEQ ID NO:817 and SEQ ID NO:818, SEQ ID NO:819 and SEQ ID NO:820,
SEQ ID NO:821 and SEQ ID NO:822, SEQ ID NO:823 and SEQ ID NO:824,
SEQ ID NO:825 and SEQ ID NO:826, SEQ ID NO:827 and SEQ ID NO:828,
SEQ ID NO:829 and SEQ ID NO:830, SEQ ID NO:831 and SEQ ID NO:832,
SEQ ID NO:833 and SEQ ID NO:834, SEQ ID NO:835 and SEQ ID NO:836,
SEQ ID NO:837 and SEQ ID NO:838, SEQ ID NO:839 and SEQ ID NO:840,
SEQ ID NO:841 and SEQ ID NO:842, SEQ ID NO: 843 and SEQ ID NO:844,
SEQ ID NO: 845 and SEQ ID NO: 846, SEQ ID NO:847 and SEQ ID NO:848,
SEQ ID NO:849 and SEQ ID NO:850, SEQ ID NO:851 and SEQ ID NO:852,
SEQ ID NO:853 and SEQ ID NO:854, SEQ ID NO: 855 and SEQ ID NO:856,
SEQ ID NO:857 and SEQ ID NO:858, SEQ ID NO:859 and SEQ ID NO:860,
SEQ ID NO:861 and SEQ ID NO:862, SEQ ID NO: 863 and SEQ ID NO:864,
SEQ ID NO:865 and SEQ ID NO:866, SEQ ID NO: 867 and SEQ ID NO:868,
SEQ ID NO:869 and SEQ ID NO:870, SEQ ID NO:871 and SEQ ID NO:872,
SEQ ID NO:873 and SEQ ID NO:874, SEQ ID NO:875 and SEQ ID NO:876,
SEQ ID NO:877 and SEQ ID NO:878, SEQ ID NO: 879 and SEQ ID NO:880,
SEQ ID NO: 881 and SEQ ID NO:882, SEQ ID NO: 883 and SEQ ID NO:884,
SEQ ID NO:885 and SEQ ID NO:886, SEQ ID NO: 887 and SEQ ID NO:888,
SEQ ID NO:889 and SEQ ID NO:890, SEQ ID NO:891 and SEQ ID NO:892,
SEQ ID NO:893 and SEQ ID NO:894, SEQ ID NO:895 and SEQ ID NO:896,
SEQ ID NO:897 and SEQ ID NO:898, SEQ ID NO:899 and SEQ ID NO:900,
SEQ ID NO:901 and SEQ ID NO:902, SEQ ID NO:903 and SEQ ID NO:904,
SEQ ID NO:905 and SEQ ID NO:906, SEQ ID NO:907 and SEQ ID NO:908,
SEQ ID NO:909 and SEQ ID NO:910, SEQ ID NO:911 and SEQ ID NO:912,
SEQ ID NO:913 and SEQ ID NO:914, SEQ ID NO:915 and SEQ ID NO:916,
SEQ ID NO:917 and SEQ ID NO:918, SEQ ID NO:919 and SEQ ID NO:920,
SEQ ID NO: 921 and SEQ ID NO: 922, SEQ ID NO: 923 and SEQ ID NO:924,
SEQ ID NO:925 and SEQ ID NO:926, SEQ ID NO:927 and SEQ ID NO:928,
SEQ ID NO:929 and SEQ ID NO:930, SEQ ID NO:931 and SEQ ID NO:932,
SEQ ID NO:933 and SEQ ID NO:934, SEQ ID NO:935 and SEQ ID NO:936,
SEQ ID NO:937 and SEQ ID NO:938, SEQ ID NO:939 and SEQ ID NO:940,
SEQ ID NO:941 and SEQ ID NO:942, SEQ ID NO:943 and SEQ ID NO:944,
SEQ ID NO:945 and SEQ ID NO:946, SEQ ID NO:947 and SEQ ID NO:948,
SEQ ID NO:949 and SEQ ID NO:950, SEQ ID NO:951 and SEQ ID NO:952,
SEQ ID NO:953 and SEQ ID NO:954, SEQ ID NO:955 and SEQ ID NO:956,
SEQ ID NO:957 and SEQ ID NO:958, SEQ ID NO:959 and SEQ ID NO:960,
SEQ ID NO:961 and SEQ ID NO:962, SEQ ID NO:963 and SEQ ID NO:964,
SEQ ID NO:965 and SEQ ID NO:966, SEQ ID NO:967 and SEQ ID NO:968,
SEQ ID NO:969 and SEQ ID NO:970, SEQ ID NO:971 and SEQ ID NO:972,
SEQ ID NO:973 and SEQ ID NO:974, SEQ ID NO:975 and SEQ ID NO:976,
SEQ ID NO:977 and SEQ ID NO:978, SEQ ID NO:979 and SEQ ID NO:980,
SEQ ID NO:981 and SEQ ID NO: 982, SEQ ID NO: 983 and SEQ ID NO:984,
SEQ ID NO:985 and SEQ ID NO:986, SEQ ID NO: 987 and SEQ ID NO: 988,
SEQ ID NO:989 and SEQ ID NO:990, SEQ ID NO:991 and SEQ ID NO:992,
SEQ ID NO:993 and SEQ ID NO:994, SEQ ID NO:995 and SEQ ID NO:996,
SEQ ID NO:997 and SEQ ID NO:998, SEQ ID NO:999 and SEQ ID NO: 1000,
SEQ ID NO: 1001 and SEQ ID NO: 1002, SEQ ID NO: 1003 and SEQ ID NO: 1004,
SEQ ID NO: 1005 and SEQ ID NO: 1006, SEQ ID NO: 1007 and SEQ ID NO: 1008,
SEQ ID NO: 1009 and SEQ ID NO: 1010, SEQ ID NO: 1011 and SEQ ID NO: 1012,
SEQ ID NO: 1013 and SEQ ID NO: 1014, SEQ ID NO: 1015 and SEQ ID NO: 1016,
SEQ ID NO: 1017 and SEQ ID NO: 1018, SEQ ID NO: 1019 and SEQ ID NO: 1020,
SEQ ID NO: 1021 and SEQ ID NO: 1022, SEQ ID NO: 1023 and SEQ ID NO: 1024,
SEQ ID NO: 1025 and SEQ ID NO: 1026, SEQ ID NO: 1027 and SEQ ID NO: 1028,
SEQ ID NO: 1029 and SEQ ID NO: 1030, SEQ ID NO: 1031 and SEQ ID NO: 1032,
SEQ ID NO: 1033 and SEQ ID NO: 1034, SEQ ID NO: 1035 and SEQ ID NO: 1036,
SEQ ID NO: 1037 and SEQ ID NO: 1038, SEQ ID NO: 1039 and SEQ ID NO: 1040,
SEQ ID NO: 1041 and SEQ ID NO: 1042, SEQ ID NO: 1043 and SEQ ID NO: 1044,
SEQ ID NO: 1045 and SEQ ID NO: 1046, SEQ ID NO: 1047 and SEQ ID NO: 1048,
SEQ ID NO: 1049 and SEQ ID NO: 1050, SEQ ID NO: 1051 and SEQ ID NO: 1052,
SEQ ID NO: 1053 and SEQ ID NO: 1054, SEQ ID NO: 1055 and SEQ ID NO: 1056,
SEQ ID NO: 1057 and SEQ ID NO: 1058, SEQ ID NO: 1059 and SEQ ID NO: 1060,
SEQ ID NO: 1061 and SEQ ID NO: 1062, SEQ ID NO: 1063 and SEQ ID NO: 1064,
SEQ ID NO: 1065 and SEQ ID NO: 1066, SEQ ID NO: 1067 and SEQ ID NO: 1068,
SEQ ID NO: 1069 and SEQ ID NO: 1070, SEQ ID NO: 1071 and SEQ ID NO: 1072,
SEQ ID NO: 1073 and SEQ ID NO: 1074, SEQ ID NO: 1075 and SEQ ID NO: 1076,
SEQ ID NO: 1077 and SEQ ID NO: 1078, SEQ ID NO: 1079 and SEQ ID NO: 1080,
SEQ ID NO: 1081 and SEQ ID NO: 1082, SEQ ID NO: 1083 and SEQ ID NO: 1084,
SEQ ID NO: 1085 and SEQ ID NO: 1086, SEQ ID NO: 1087 and SEQ ID NO: 1088,
SEQ ID NO: 1089 and SEQ ID NO: 1090, SEQ ID NO: 1091 and SEQ ID NO: 1092,
SEQ ID NO: 1093 and SEQ ID NO: 1094, SEQ ID NO: 1095 and SEQ ID NO: 1096,
SEQ ID NO: 1097 and SEQ ID NO: 1098, SEQ ID NO: 1099 and SEQ ID NO:1100,
SEQ ID NO: 1101 and SEQ ID NO: 1102, SEQ ID NO: 1103 and SEQ ID NO: 1104,
SEQ ID NO: 1105 and SEQ ID NO: 1106, SEQ ID NO: 1107 and SEQ ID NO: 1108,
SEQ ID NO: 1109 and SEQ ID NO: 1110, SEQ ID NO: 1111 and SEQ ID NO: 1112,
SEQ ID NO: 1113 and SEQ ID NO: 1114, SEQ ID NO: 1115 and SEQ ID NO:1116,
SEQ ID NO: 1117 and SEQ ID NO: 1118, SEQ ID NO: 1119 and SEQ ID NO: 1120,
SEQ ID NO: 1121 and SEQ ID NO: 1122, SEQ ID NO: 1123 and SEQ ID NO: 1124,
SEQ ID NO: 1125 and SEQ ID NO: 1126, SEQ ID NO: 1127 and SEQ ID NO: 1128,
SEQ ID NO: 1129 and SEQ ID NO: 1130, SEQ ID NO: 1131 and SEQ ID NO: 1132,
SEQ ID NO: 1133 and SEQ ID NO:1134, SEQ ID NO: 1135 and SEQ ID NO: 1136,
SEQ ID NO: 1137 and SEQ ID NO: 1138, SEQ ID NO: 1139 and SEQ ID NO: 1140,
SEQ ID NO: 1141 and SEQ ID NO: 1142, SEQ ID NO: 1143 and SEQ ID NO: 1144,
SEQ ID NO: 1145 and SEQ ID NO: 1146, SEQ ID NO: 1147 and SEQ ID NO: 1148,
SEQ ID NO: 1149 and SEQ ID NO: 1150, SEQ ID NO: 1151 and SEQ ID NO: 1152,
SEQ ID NO: 1153 and SEQ ID NO: 1154, SEQ ID NO: 1155 and SEQ ID NO: 1156,
SEQ ID NO: 1157 and SEQ ID NO: 1158, SEQ ID NO: 1159 and SEQ ID NO: 1160,
SEQ ID NO: 1161 and SEQ ID NO: 1162, SEQ ID NO: 1163 and SEQ ID NO: 1164,
SEQ ID NO: 1165 and SEQ ID NO: 1166, SEQ ID NO: 1167 and SEQ ID NO: 1168,
SEQ ID NO: 1169 and SEQ ID NO: 1170, SEQ ID NO: 1171 and SEQ ID NO: 1172,
SEQ ID NO:1173 and SEQ ID NO: 1174, SEQ ID NO:1175 and SEQ ID NO: 1176,
SEQ ID NO: 1177 and SEQ ID NO: 1178, SEQ ID NO: 1179 and SEQ ID NO: 1180,
SEQ ID NO: 1181 and SEQ ID NO: 1182, SEQ ID NO: 1183 and SEQ ID NO: 1184,
SEQ ID NO: 1185 and SEQ ID NO: 1186, SEQ ID NO: 1187 and SEQ ID NO: 1188,
SEQ ID NO: 1189 and SEQ ID NO: 1190, SEQ ID NO: 1191 and SEQ ID NO: 1192,
SEQ ID NO: 1193 and SEQ ID NO: 1194, SEQ ID NO: 1195 and SEQ ID NO: 1196,
SEQ ID NO: 1197 and SEQ ID NO: 1198, SEQ ID NO: 1199 and SEQ ID NO: 1200,
SEQ ID NO: 1201 and SEQ ID NO: 1202, SEQ ID NO: 1203 and SEQ ID NO: 1204,
SEQ ID NO: 1205 and SEQ ID NO: 1206, SEQ ID NO: 1207 and SEQ ID NO: 1208,
SEQ ID NO: 1209 and SEQ ID NO: 1210, SEQ ID NO: 1211 and SEQ ID NO: 1212,
SEQ ID NO: 1213 and SEQ ID NO: 1214, SEQ ID NO: 1215 and SEQ ID NO: 1216,
SEQ ID NO: 1217 and SEQ ID NO: 1218, SEQ ID NO: 1219 and SEQ ID NO: 1220,
SEQ ID NO: 1221 and SEQ ID NO: 1222, SEQ ID NO: 1223 and SEQ ID NO: 1224,
SEQ ID NO: 1225 and SEQ ID NO: 1226, SEQ ID NO: 1227 and SEQ ID NO: 1228,
SEQ ID NO: 1229 and SEQ ID NO: 1230, SEQ ID NO: 1231 and SEQ ID NO: 1232,
SEQ ID NO: 1233 and SEQ ID NO: 1234, SEQ ID NO: 1235 and SEQ ID NO: 1236,
SEQ ID NO: 1237 and SEQ ID NO: 1238, SEQ ID NO: 1239 and SEQ ID NO: 1240,
SEQ ID NO: 1241 and SEQ ID NO: 1242, SEQ ID NO: 1243 and SEQ ID NO: 1244,
SEQ ID NO: 1245 and SEQ ID NO: 1246, SEQ ID NO: 1247 and SEQ ID NO: 1248,
SEQ ID NO: 1249 and SEQ ID NO: 1250, SEQ ID NO: 1251 and SEQ ID NO: 1252,
SEQ ID NO: 1253 and SEQ ID NO: 1254, SEQ ID NO: 1255 and SEQ ID NO: 1256,
SEQ ID NO: 1257 and SEQ ID NO: 1258, SEQ ID NO: 1259 and SEQ ID NO: 1260,
SEQ ID NO: 1261 and SEQ ID NO: 1262, SEQ ID NO: 1263 and SEQ ID NO: 1264,
SEQ ID NO: 1265 and SEQ ID NO: 1266, SEQ ID NO: 1267 and SEQ ID NO: 1268,
SEQ ID NO: 1269 and SEQ ID NO: 1270, SEQ ID NO: 1271 and SEQ ID NO: 1272,
SEQ ID NO: 1273 and SEQ ID NO: 1274, SEQ ID NO: 1275 and SEQ ID NO: 1276,
SEQ ID NO: 1277 and SEQ ID NO: 1278, SEQ ID NO: 1279 and SEQ ID NO: 1280,
SEQ ID NO: 1281 and SEQ ID NO: 1282, SEQ ID NO: 1283 and SEQ ID NO: 1284,
and SEQ ID NO: 1398 and SEQ ID NO:1399.

7. The method of claim 4, wherein the identification in (d) is by loop-mediated isothermal amplification (LAMP).

8. The method of claim 7, wherein a gene for the production of terpinolene is identified and/or quantified in (d).

9. The method of claim 8, wherein the set of polynucleotide primers for identification by loop-mediated isothermal amplification (LAMP) is selected from among one or more of the following sets:
SEQ ID NOS: 1285-1293,
SEQ ID NOS: 1294-1302,
SEQ ID NOS:1303-1311,
SEQ ID NOS: 1312-1319, and
SEQ ID NOS: 1320-1327.

10. The method of claim 2, wherein, based on identifying and/or quantifying at least one terpene synthase gene or a paralog thereof in (d) the terpene synthase gene profile and/or the terpene synthase expression profile of the Cannabis plant cultivar is determined.

11. The method of claim 10, wherein, based on determining the terpene synthase gene profile and/or the terpene synthase expression profile of the Cannabis plant cultivar, a medicinal use is assigned to the Cannabis plant cultivar.

12. The method of claim 11, wherein the medicinal use is selected from among one or more of antioxidant, anti-inflammatory, antibacterial, antiviral, anti-anxiety, antinociceptive, analgesic, antihypertensive, sedative, antidepressant, acetylcholine esterase inhibition (AChEI), neuro-protective and gastro-protective effects.

13. The method of claim 10, wherein, based on determining the terpene synthase gene profile and/or the terpene synthase expression profile of the Cannabis plant cultivar, the Cannabis plant cultivar is selected for resistance to an organism or situation that is selected from among exposure to insects, insecticides, mold, pesticides, mildew, fungi, bacteria, an environmental condition or a geographic location.

14. The method of claim 13, wherein the organism or situation is exposure to insects and/or exposure to pesticides.

15. A method of producing offspring from one or more plant cultivars, comprising:
(i) obtaining one or more plant cultivars or samples therefrom, wherein the one or more plant cultivars are Cannabis cultivars;
(ii) analyzing nucleic acid from the one or more plant cultivars according to the method of claim 1;
(iii) based on (ii), identifying the one or more plant cultivars for breeding or for not breeding; and
(iv) if the one or more plant cultivars are identified for breeding in (iii), breeding all or a subset of the one or more plant cultivars so identified, thereby producing offspring of the one or more plant cultivars so identified.

16. The method of claim 15, wherein one or more of the offspring cultivars produces an increased sedative effect compared to at least one of the parent cultivars.

17. The method of claim 16, wherein the one or more offspring cultivars comprises a terpene profile comprising one or more of: about equal or equal amounts of β-pinene and α-pinene production, increased R-linalool production, increased limonene production, increased trans-nerolidol production, increased terpineol production, increased camphene production, reduced or lack of β-ocimene production, reduced or lack of S-linalool production and reduced or lack of terpinolene production compared to at least one of the parent cultivars.

18. The method of claim 15, wherein one or more of the offspring cultivars show increased anti-pathogenic properties compared to at least one of the parent cultivars.

19. The method of claim 18, wherein the one or more offspring cultivars comprises a terpene synthase profile comprising one or more of increased amounts/expression of TPS13-like2JL, TPS13JL, TPS17JL, TPS30JL, TPS64JL, TPS6-likeJL, TPS6JL, TPS11-likeJL, TPS51JL, TPS30-likeJL, TPS3JL, TPS52JL, TPS5JL, TPS13-like1JL, TPS42JL, TPS1JL, TPS53JL, TPS12JL, TPS40JL, TPS63JL, TPS33JL, TPS61JL, TPS12-likeJL, TPS62JL, TPS2JL, TPS43JL, TPS11JL, TPS38JL, TPS36JL and/or TPS37JL compared to at least one of the parent cultivars.

20. The method of claim 2, wherein at least one plant cultivar that is analyzed expresses one or more terpene synthases selected from among TPS11JL, TPS11-likeJL, TPS12JL, TPS12-likeJL, TPS13JL, TPS13-likeJL, TPS13-like2JL, TPS14JL, TPS15JL, TPS16JL, TPS17JL, TPS18JL, TPS19JL, TPS1JL, TPS20JL, TPS23JL, TPS24JL, TPS2JL, TPS30JL, TPS30-likeJL, TPS32JL, TPS33JL, TPS36JL, TPS37JL, TPS38JL, TPS39JL, TPS3JL, TPS40JL, TPS41JL, TPS42JL, TPS43JL, TPS44JL, TPS45JL, TPS46JL, TPS47JL, TPS48JL, TPS49JL, TPS4JL, TPS4-likeJL, TPS50JL, TPS51JL, TPS52JL, TPS53JL, TPS54JL, TPS55JL, TPS56JL, TPS57JL, TPS58JL, TPS59JL, TPS5JL, TPS5JL, TPS60JL, TPS61JL, TPS62JL, TPS63JL, TPS64JL, TPS6JL, TPS6-likeJL, TPS7JL, TPS8JL, TPS8JL, TPS8-likeJL, TPS9JL, TPS9JL, TPS9-likeJL and TPS9-like2JL.

21. A kit, comprising:
(a) one or more polynucleotide primer pairs, wherein
(i) each polynucleotide primer pair hybridizes to a unique subsequence of the terpene synthase gene or a paralog thereof,
(ii) the unique subsequence of the terpene synthase gene or a paralog thereof is different than the other subsequences of the terpene synthase gene or a paralog thereof,
(iii) the unique subsequence of the terpene synthase gene or a paralog thereof is different than the subsequences of other terpene synthase genes and/or paralogs thereof,
(iv) the unique subsequence is an exon or a portion within an exon of the terpene synthase gene or paralog thereof, and
(v) each of the primers of the polynucleotide primer pair hybridizes to a conserved region of the unique subsequence and the hybridized polynucleotide primer pair flanks a variable region of the unique subsequence; and
(b) instructions for use according to the method of claim 1.
